(19) United States
(12) Patent Application Publication
(10) Pub. No.: US 2012/0107894 A1
(43) Pub. Date: May 3, 2012

(54) Methods and Compositions for the Recombinant Biosynthesis of Terminal Olefins

(75) Inventors: Frank A. Skraly, Watertown, MA (US); Christian P. Ridley, Acton, MA (US)

(73) Assignee: JOULE UNLIMITED TECHNOLOGIES, INC., Cambridge, MA (US)

(21) Appl. No.: 13/284,311

(22) Filed: Oct. 28, 2011

Related U.S. Application Data
(60) Provisional application No. 61/407,699, filed on Oct. 28, 2010.

(51) Int. Cl. C12P 5/00; C12N 1/19; C12N 1/12; C12N 1/21

(52) U.S. Cl. 435/166; 435/252.3; 435/252.33; 435/254.2; 435/254.21; 435/257.2

(57) ABSTRACT

The present disclosure identifies methods and compositions for modifying microbial cells, such that the organisms efficiently synthesize terminal olefins, and in particular the use of such organisms for the commercial production of propylene and related molecules.

### SEQUENCE LISTING

[0001] The instant application contains a Sequence Listing which has been submitted in ASCII format via EFS-Web and is hereby incorporated by reference in its entirety. Said ASCII copy, created on Oct. 28, 2011, is named 19357US_CRF_sequencelisting.txt and is 909,261 bytes in size.

### FIELD OF THE INVENTION

[0002] The present disclosure relates to methods for conferring terminal olefin-producing properties to a heterotrophic or photoautotrophic microbial cell, such that the modified microbial cells can be used in the commercial production of terminal olefins.

### BACKGROUND OF THE INVENTION

[0003] A terminal olefin is an unsaturated organic compound with a carbon chain backbone, having at least one double bond at the end of the carbon chain. Synthesis of terminal olefins, such as propylene, has significant utility from an industrial prospective.

[0004] Propylene is a terminal olefin molecule of chemical formula C₃H₆ which is used to manufacture polyethylene, polypropylene, alpha olefins, and styrene. It is also used industrially to produce materials such as polyester, acrylics, ethylene glycol antifreeze, polyvinyl chloride (PVC), propylene oxide, oxo alcohols, and isopropanol. Propylene can be derived from fractional distillation from hydrocarbon mixtures obtained from cracking and other refining processes. However, propylene production by engineered host cells represents a significant alternative to traditional methods of production.

[0005] A need exists therefore, for photosynthetic and non-photosynthetic strains which can make terminal olefins such as propylene and related molecules.

### SUMMARY OF THE INVENTION

[0006] The disclosure provides a microbial cell for producing a hydrocarbon comprising a recombinant sulfotransferase protein activity and/or a recombinant thioesterase protein activity, wherein the cell synthesizes at least one terminal olefin. The disclosure further provides a method for producing a terminal olefin, comprising culturing an engineered microbial cell in a culture medium, wherein the engineered microbial cell comprises a set of recombinant enzymes comprising at least one sulfotransferase domain and/or at least one thioesterase domain; and isolating the terminal olefin from the microbial cell or the culture medium. In one embodiment of the invention, the microbial cell comprises a nonA gene. In another embodiment, the microbial cell comprises a recombinantly expressed protein comprising any of SEQ ID NOs: 1-3. In an alternative embodiment, the microbial cell comprises a recombinantly expressed protein selected from Tables 1-3 (SEQ ID NOS 4-104, respectively, in order of appearance).

[0007] In one aspect of the invention, the microbial cell is a gram-negative or gram-positive bacterium. In another aspect of the invention, the microbial cell is capable of photosynthesis. In still another aspect, the microbial cell is a cyanobacterium. In yet another aspect, the microbial cell comprises endogenous 3-hydroxybutyryl-ACP and/or endogenous 3-hydroxybutyryl-CoA.

[0008] In one embodiment, the microbial cell is engineered to synthesize 3-hydroxybutyryl-ACP. In another embodiment, the engineering comprises expressing in the microbial cell a recombinant accBCAD gene or a recombinant fabDHG gene. In still another embodiment, the engineering comprises expressing in said microbial cell a genetically modified gene encoding a polypeptide comprising 3-hydroxyacyl-ACP dehydratase activity. In a further embodiment, the engineered microbial cell has a reduced 3-hydroxyacyl-ACP dehydratase activity as compared to a control microbial cell that does not express the genetically modified gene encoding a polypeptide comprising 3-hydroxyacyl-ACP dehydratase activity. In still another embodiment, the genetic modification knocks out an endogenous gene encoding a polypeptide comprising 3-hydroxyacyl-ACP dehydratase activity. In yet another embodiment, the genetically modified gene encoding a polypeptide comprising 3-hydroxyacyl-ACP dehydratase activity is under the control of an inducible promoter. In another embodiment, the microbial cell is cultured in the presence of long chain fatty acids. In one embodiment, the microbial cell produces propylene.

[0009] The invention provides for a microbial cell engineered to synthesize 3-hydroxybutyryl-CoA. The invention also provides for a microbial cell engineered to express recombinant phaA gene and a recombinant phaB gene. In one embodiment, the microbial cell produces propylene. In another embodiment, the propylene is synthesized from acetyl-CoA. In still another embodiment, the terminal olefin synthesized in the microbial cell is selected from the group consisting of ethylene, propylene, butylenes, butadiene, isoprene, and 1-nonadecene.

[0010] In one particular embodiment, the microbial cell recombinantly expresses a curM gene. In another particular embodiment, the microbial cell recombinantly expresses a nonA gene.

[0011] In another embodiment of the present invention, an engineered microbial cell is provided, wherein the engineered microbial cell is selected from the group consisting of a bacterium, a yeast, and an algae, wherein the engineered microbial cell comprises one or more recombinant genes encoding a polypeptide comprising a sulfotransferase domain and/or a thioesterase domain, and wherein the engineered microbial cell synthesizes at least one terminal olefin. In a further embodiment, the bacterium is cyanobacterium. In another further embodiment, the bacterium is E. Coli. In yet another embodiment, the bacterium is Chlamydomonas reinhardtii. In still another embodiment, the bacterium is Chlamydomonas reinhardtii. In one particular embodiment, the yeast is S. cerevisiae.

### BRIEF DESCRIPTION OF THE FIGURES

[0012] FIG. 1: Pathway for synthesis of propylene from 3-hydryxobutyryl-CoA or 3-hydroxybutyryl-ACP.

### DETAILED DESCRIPTION OF THE INVENTION

[0013] Unless otherwise defined herein, scientific and technical terms used in connection with the present invention shall have the meanings that are commonly understood by those of ordinary skill in the art. Further, unless otherwise required by context, singular terms shall include the plural and plural terms shall include the singular. Generally, nomenclatures used in connection with, and techniques of, biochemistry, enzymology, molecular and cellular biology, microbiology, genetics and protein and nucleic acid chemistry and hybridization described herein are those well known and commonly used in the art. The methods and techniques of the present invention are generally performed according to conventional methods well known in the art and as described in various general and more specific references that are cited and discussed throughout the present specification unless otherwise indicated. See, e.g., Sambrook et al. Molecular Cloning: A Laboratory Manual, 2d ed., Cold Spring Harbor Laboratory Press, Cold Spring Harbor, N.Y. (1989); Ausubel et al., Current Protocols in Molecular Biology, Greene Publishing Associates (1992, and Supplements to 2002); Harlow and Lane, Antibodies: A Laboratory Manual, Cold Spring Harbor Laboratory Press, Cold Spring Harbor, N.Y. (1990); Taylor and Drickamer, Introduction to Glycobiology, Oxford Univ. Press (2003); Worthington Enzyme Manual, Worthington Biochemical Corp., Freehold, N.J.; Handbook of Biochemistry: Section A Proteins, Vol I, CRC Press (1976); Handbook of Biochemistry: Section A Proteins, Vol II, CRC Press (1976); Essentials of Glycobiology, Cold Spring Harbor Laboratory Press (1999).

[0014] The following terms, unless otherwise indicated, shall be understood to have the following meanings:

[0015] The term “polynucleotide” or “nucleic acid molecule” refers to a polymeric form of nucleotides of at least 10 bases in length. The term includes DNA molecules (e.g., cDNA or genomic or synthetic DNA) and RNA molecules (e.g., mRNA or synthetic RNA), as well as analogs of DNA or RNA containing non-natural nucleotide analogs, non-native internucleoside bonds, or both. The nucleic acid can be in any topological conformation. For instance, the nucleic acid can be single-stranded, double-stranded, triple-stranded, quadruplexed, partially double-stranded, branched, hairpinned, circular, or in a padlocked conformation.

[0016] The term “recombinant” refers to a biomolecule, e.g., a gene or protein, that (1) has been removed from its naturally occurring environment, (2) is not associated with all or a portion of a polynucleotide in which the gene is found in nature, (3) is operatively linked to a polynucleotide which it is not linked to in nature, or (4) does not occur in nature. The term “recombinant” can be used in reference to cloned DNA isolates, chemically synthesized polynucleotide analogs, or polynucleotide analogs that are biologically synthesized by heterologous systems, as well as proteins and/or mRNAs encoded by such nucleic acids.

[0017] As used herein, an endogenous nucleic acid sequence in the genome of an organism (or the encoded protein product of that sequence) is deemed “recombinant” herein if a heterologous sequence is placed adjacent to the endogenous nucleic acid sequence, such that the expression of this endogenous nucleic acid sequence is altered. In this context, a heterologous sequence is a sequence that is not naturally adjacent to the endogenous nucleic acid sequence, whether or not the heterologous sequence is itself endogenous (originating from the same microbial cell or progeny thereof) or exogenous (originating from a different microbial cell or progeny thereof). By way of example, a promoter sequence can be substituted (e.g., by homologous recombination) for the native promoter of a gene in the genome of a microbial cell, such that this gene has an altered expression pattern. This gene would now become “recombinant” because it is separated from at least some of the sequences that naturally flank it.

[0018] A nucleic acid is also considered “recombinant” if it contains any modifications that do not naturally occur to the corresponding nucleic acid in a genome. For instance, an endogenous coding sequence is considered “recombinant” if it contains an insertion, deletion or a point mutation introduced artificially, e.g., by human intervention. A “recombinant nucleic acid” also includes a nucleic acid integrated into a microbial cell chromosome at a heterologous site and a nucleic acid construct present as an episome.

[0019] The nucleic acids (also referred to as polynucleotides) of the present invention may include both sense and antisense strands of RNA, cDNA, genomic DNA, and synthetic forms and mixed polymers of the above. They may be modified chemically or biochemically or may contain non-natural or derivatized nucleotide bases, as will be readily appreciated by those of skill in the art. Such modifications include, for example, labels, methylation, substitution of one or more of the naturally occurring nucleotides with an analog, internucleotide modifications such as uncharged linkages (e.g., methyl phosphonates, phosphotriesters, phosphoramidates, carbamates, etc.), charged linkages (e.g., phosphorothioates, phosphorodithioates, etc.), pendent moieties (e.g., polypeptides), intercalators (e.g., acridine, psoralen, etc.), chelators, alkylators, and modified linkages (e.g., alpha anomeric nucleic acids, etc.) Also included are synthetic molecules that mimic polynucleotides in their ability to bind to a designated sequence via hydrogen bonding and other chemical interactions. Such molecules are known in the art and include, for example, those in which peptide linkages substitute for phosphate linkages in the backbone of the molecule. Other modifications can include, for example, analogs in which the ribose ring contains a bridging moiety or other structure such as the modifications found in “locked” nucleic acids.

[0020] The term “mutated” when applied to nucleic acid sequences means that nucleotides in a nucleic acid sequence may be inserted, deleted or changed compared to a reference nucleic acid sequence. A single alteration may be made at a locus (a point mutation) or multiple nucleotides may be inserted, deleted or changed at a single locus. In addition, one or more alterations may be made at any number of loci within a nucleic acid sequence. A nucleic acid sequence may be mutated by any method known in the art including but not limited to mutagenesis techniques such as “error-prone PCR” (a process for performing PCR under conditions where the copying fidelity of the DNA polymerase is low, such that a high rate of point mutations is obtained along the entire length of the PCR product; see, e.g., Leung et al., Technique, 1:11-15 (1989) and Caldwell and Joyce, PCR Methods Applic. 2:28-33 (1992)); and “oligonucleotide-directed mutagenesis” (a process which enables the generation of site-specific mutations in any cloned DNA segment of interest; see, e.g., Reidhaar-Olson and Sauer, Science 241:53-57 (1988)).

[0021] The term “attenuate” as used herein generally refers to a functional deletion, including a mutation, partial or complete deletion, insertion, or other variation made to a gene sequence or a sequence controlling the transcription of a gene sequence, which reduces or inhibits production of the gene product, or renders the gene product non-functional. In some instances a functional deletion is described as a knockout mutation. Attenuation also includes amino acid sequence changes by altering the nucleic acid sequence, placing the gene under the control of a less active promoter, down-regulation, expressing interfering RNA, ribozymes or antisense sequences that target the gene of interest, or through any other technique known in the art. In one example, the sensitivity of a particular enzyme to feedback inhibition or inhibition caused by a composition that is not a product or a reactant (non-pathway specific feedback) is lessened such that the enzyme activity is not impacted by the presence of a compound. In other instances, an enzyme that has been altered to be less active can be referred to as attenuated.

[0022] Deletion: The removal of one or more nucleotides from a nucleic acid molecule or one or more amino acids from a protein, the regions on either side being joined together.

[0023] Knock-out: A gene whose level of functional expression or activity has been reduced to an undetectable levels. In some examples, a gene is knocked-out via deletion of some or all of its coding sequence. In other examples, a gene is knocked-out via introduction of one or more nucleotides into its open-reading frame, which results in translation of a non-sense or otherwise non-functional protein product.

[0024] The term “vector” as used herein is intended to refer to a nucleic acid molecule capable of transporting another nucleic acid to which it has been linked. One type of vector is a “plasmid,” which refers to a circular double stranded DNA loop into which additional DNA segments may be ligated. Other vectors include cosmids, bacterial artificial chromosomes (BAC) and yeast artificial chromosomes (YAC). Another type of vector is a viral vector, wherein additional DNA segments may be ligated into the viral genome (discussed in more detail below). Certain vectors are capable of autonomous replication in a host cell into which they are introduced (e.g., vectors having an origin of replication which functions in the host cell). Other vectors can be integrated into the genome of a host cell upon introduction into the host cell, and are thereby replicated along with the host genome. Moreover, certain preferred vectors are capable of directing the expression of genes to which they are operatively linked. Such vectors are referred to herein as “recombinant expression vectors” (or simply “expression vectors”).

[0025] “Operatively linked” or “operably linked” expression control sequences refers to a linkage in which the expression control sequence is contiguous with the gene of interest to control the gene of interest, as well as expression control sequences that act in trans or at a distance to control the gene of interest.

[0026] The term “expression control sequence” as used herein refers to polynucleotide sequences which are necessary to affect the expression of coding sequences to which they are operatively linked. Expression control sequences are sequences which control the transcription, post-transcriptional events and translation of nucleic acid sequences. Expression control sequences include appropriate transcription initiation, termination, promoter and enhancer sequences; efficient RNA processing signals such as splicing and polyadenylation signals; sequences that stabilize cytoplasmic mRNA; sequences that enhance translation efficiency (e.g., ribosome binding sites); sequences that enhance protein stability; and when desired, sequences that enhance protein secretion. The nature of such control sequences differs depending upon the host organism; in prokaryotes, such control sequences generally include promoter, ribosomal binding site, and transcription termination sequence. The term “control sequences” is intended to include, at a minimum, all components whose presence is essential for expression, and can also include additional components whose presence is advantageous, for example, leader sequences and fusion partner sequences.

[0027] The term “recombinant microbial cell” (or simply “microbial cell” or “host cell”), as used herein, is intended to refer to a cell into which a recombinant nucleic acid molecule, such as, e.g., a recombinant vector has been introduced. It should be understood that such terms are intended to refer not only to the particular subject cell but to the progeny of such a cell. Because certain modifications may occur in succeeding generations due to either mutation or environmental influences, such progeny may not, in fact, be identical to the parent cell, but are still included within the scope of the term “microbial cell” or “host cell” as used herein. A recombinant microbial cell may be an isolated cell or cell line grown in culture or may be a cell which resides in a living tissue or organism.

[0028] The term “peptide” as used herein refers to a short polypeptide, e.g., one that is typically less than about 50 amino acids long and more typically less than about 30 amino acids long. The term as used herein encompasses analogs and mimetics that mimic structural and thus biological function.

[0029] The term “polypeptide” encompasses both naturally-occurring and non-naturally-occurring proteins, and fragments, mutants, derivatives and analogs thereof. A polypeptide may be monomeric or polymeric. Further, a polypeptide may comprise a number of different domains each of which has one or more distinct activities.

[0030] The term “isolated protein” or “isolated polypeptide” is a protein or polypeptide that by virtue of its origin or source of derivation (1) is not associated with naturally associated components that accompany it in its native state, (2) exists in a purity not found in nature, where purity can be adjudged with respect to the presence of other cellular material (e.g., is free of other proteins from the same species) (3) is expressed by a cell from a different species, or (4) does not occur in nature (e.g., it is a fragment of a polypeptide found in nature or it includes amino acid analogs or derivatives not found in nature or linkages other than standard peptide bonds). Thus, a polypeptide that is chemically synthesized or synthesized in a cellular system different from the cell from which it naturally originates will be “isolated” from its naturally associated components. A polypeptide or protein may also be rendered substantially free of naturally associated components by isolation, using protein purification techniques well known in the art. As thus defined, “isolated” does not necessarily require that the protein, polypeptide, peptide or oligopeptide so described has been physically removed from its native environment.

[0031] The term “polypeptide fragment” as used herein refers to a polypeptide that has a deletion, e.g., an amino-terminal, an internal, and/or a carboxy-terminal deletion compared to a full-length polypeptide. In a preferred embodiment, the polypeptide fragment is a contiguous sequence in which the amino acid sequence of the fragment is identical to the corresponding positions in the naturally-occurring sequence. Fragments typically are at least 5, 6, 7, 8, 9 or 10 amino acids long, preferably at least 12, 14, 16 or 18 amino acids long, more preferably at least 20 amino acids long, more preferably at least 25, 30, 35, 40 or 45, amino acids, even more preferably at least 50 or 60 amino acids long, and even more preferably at least 70 amino acids long.

[0032] A “modified derivative” refers to polypeptides or fragments thereof that are substantially homologous in primary structural sequence but which include, e.g., in vivo or in vitro chemical and biochemical modifications or which incorporate amino acids that are not found in the native polypeptide. Such modifications include, for example, acetylation, carboxylation, phosphorylation, glycosylation, ubiquitination, labeling, e.g., with radionuclides, and various enzymatic modifications, as will be readily appreciated by those skilled in the art. A variety of methods for labeling polypeptides and of substituents or labels useful for such purposes are well known in the art, and include radioactive isotopes such as ¹²⁵I, ³²P, ³⁵S, and ³H, ligands which bind to labeled antiligands (e.g., antibodies), fluorophores, chemiluminescent agents, enzymes, and antiligands which can serve as specific binding pair members for a labeled ligand. The choice of label depends on the sensitivity required, ease of conjugation with the primer, stability requirements, and available instrumentation. Methods for labeling polypeptides are well known in the art. See, e.g., Ausubel et al., Current Protocols in Molecular Biology, Greene Publishing Associates (1992, and Supplements to 2002) (hereby incorporated by reference).

[0033] The term “fusion protein” refers to a polypeptide comprising a polypeptide or fragment coupled to heterologous amino acid sequences. Fusion proteins are useful because they can be constructed to contain two or more desired functional elements from two or more different proteins. A fusion protein may comprise at least 10 contiguous amino acids from a polypeptide of interest, more preferably at least 20 or 30 amino acids, even more preferably at least 40, 50 or 60 amino acids, yet more preferably at least 75, 100 or 125 amino acids. Fusions that include the entirety of any of the proteins of the present invention have particular utility. The heterologous polypeptide included within the fusion protein of an embodiment of the present invention is at least 6 amino acids in length, often at least 8 amino acids in length, and usefully at least 15, 20, and 25 amino acids in length. Fusions that include larger polypeptides, such as an IgG Fc region, and even entire proteins, such as the green fluorescent protein (“GFP”) chromophore-containing proteins, have particular utility. Fusion proteins can be produced recombinantly by constructing a nucleic acid sequence which encodes the polypeptide or a fragment thereof in frame with a nucleic acid sequence encoding a different protein or peptide and then expressing the fusion protein. Alternatively, a fusion protein can be produced chemically by crosslinking the polypeptide or a fragment thereof to another protein.

[0034] The term “non-peptide analog” refers to a compound with properties that are analogous to those of a reference polypeptide. A non-peptide compound may also be termed a “peptide mimetic” or a “peptidomimetic.” See, e.g., Jones, Amino Acid and Peptide Synthesis, Oxford University Press (1992); Jung, Combinatorial Peptide and Nonpeptide Libraries: A Handbook, John Wiley (1997); Bodanszky et al., Peptide Chemistry—A Practical Textbook, Springer Verlag (1993); Synthetic Peptides: A Users Guide, (Grant, ed., W. H. Freeman and Co., 1992); Evans et al., J. Med. Chem. 30:1229 (1987); Fauchere, J. Adv. Drug Res. 15:29 (1986); Veber and Freidinger, Trends Neurosci., 8:392-396 (1985); and references sited in each of the above, which are incorporated herein by reference. Such compounds are often developed with the aid of computerized molecular modeling. Peptide mimetics that are structurally similar to useful peptides of the present invention may be used to produce an equivalent effect and are therefore envisioned to be part of an embodiment of the present invention.

[0035] The term “region” as used herein refers to a physically contiguous portion of the primary structure of a biomolecule. In the case of proteins, a region is defined by a contiguous portion of the amino acid sequence of that protein.

[0036] The term “domain” as used herein refers to a structure of a biomolecule that contributes to a known or suspected function of the biomolecule. Domains may be co-extensive with regions or portions thereof; domains may also include distinct, non-contiguous regions of a biomolecule. Examples of protein domains include, but are not limited to, an Ig domain, an extracellular domain, a transmembrane domain, a cytoplasmic domain, a thioesterase domain, and a sulfotransferase domain.

[0037] The term thioesterase activity or “TE” refers to an enzymatic activity of a polypeptide which catalyzes the hydrolytic cleavage of energy-rich thioester bonds as in acetyl-CoA. This activity is useful in the catalytic conversion of 3-hydroxybutyryl-CoA or 3-hydroxybutyryl-ACP to propylene.

[0038] The term sulfotransferase activity or “ST” refers to an enzymatic activity of a polypeptide which catalyzes the transfer of a sulfate group from one compound to the hydroxyl group of another. This activity is useful in the catalytic conversion of 3-hydroxybutyryl-CoA or 3-hydroxybutyryl-ACP to propylene.

[0039] As used herein, the term “molecule” means any compound, including, but not limited to, a small molecule, peptide, protein, sugar, nucleotide, nucleic acid, lipid, etc., and such a compound can be natural or synthetic.

[0040] Biofuel: A biofuel is any fuel that derives from a biological source. Biofuel refers to one or more hydrocarbons, one or more alcohols, one or more fatty esters or a mixture thereof. Preferably, liquid hydrocarbons are used.

[0041] Hydrocarbon: The term generally refers to a chemical compound that consists of the elements carbon (C), hydrogen (H) and optionally oxygen (O). There are essentially three types of hydrocarbons, e.g., aromatic hydrocarbons, saturated hydrocarbons and unsaturated hydrocarbons such as alkenes, alkynes, and dienes. The term also includes fuels, biofuels, plastics, waxes, solvents and oils. Hydrocarbons encompass biofuels, as well as plastics, waxes, solvents and oils.

[0042] Terminal Olefin: a terminal olefin is an olefin (or alkene) having at least one carbon-carbon double bond located at the terminal end of the carbon chain backbone. Terminal olefins are unsaturated hydrocarbons. They can be straight chain, branched, and cyclic terminal olefins.

[0043] Propylene or Propene: is an unsaturated organic compound having the chemical formula C₃H₆. It has one double bond, and is the second simplest member of the alkene class of hydrocarbons.

[0044] Exemplary methods and materials are described below, although methods and materials similar or equivalent to those described herein can also be used in the practice of the present invention and will be apparent to those of skill in the art. All publications and other references mentioned herein are incorporated by reference in their entirety. In case of conflict, the present specification, including definitions, will control. The materials, methods, and examples are illustrative only and not intended to be limiting.

[0045] Throughout this specification and claims, the word “comprise” or variations such as “comprises” or “comprising”, in association with a numeric limitation, including a numeric range, will be understood to imply the inclusion of a stated integer or group of integers but not the exclusion of any other integer or group of integers.

### Nucleic Acid Sequences

[0046] Terminal olefins are chemical compounds that consist only of the elements carbon (C) and hydrogen (H) (i.e., hydrocarbons), containing at least carbon-carbon double bond (i.e., they are unsaturated compounds). Together, thioesterase (TE) and sulfotransferase (ST) enzymes function to synthesize terminal olefins, such as propylene from acetyl-CoA molecules and other precursors.

[0047] Accordingly, an embodiment of the present invention provides isolated nucleic acid molecules for genes encoding TE and ST enzymes, and variants thereof. In one embodiment, the present invention provides an isolated nucleic acid molecule having a nucleic acid sequence comprising or consisting of a gene coding for TE and ST, and homologs, variants and derivatives thereof expressed in a host cell of interest. An embodiment of the present invention also provides a nucleic acid molecule comprising or consisting of a sequence which is a codon and expression optimized version of the TE and ST genes described herein. In a further embodiment, the present invention provides a nucleic acid molecule and homologs, variants and derivatives of the molecule comprising or consisting of a sequence which is a variant of the TE and ST gene having at least 76% sequence identity to a wild-type gene. The nucleic acid sequence can be preferably 80%, 85%, 90%, 95%, 98%, 99%, 99.9% or even higher identity to the wild-type gene. In one embodiment, the nucleic acid sequence encodes an enzyme selected from Tables 1-3 (SEQ ID NOS 4-104, respectively, in order of appearance).

[0048] A preferred example of algorithm that is suitable for determining percent sequence identity and sequence similarity are the BLAST and BLAST 2.0 algorithms, which are described in Altschul et al., Nuc. Acids Res. 25:3389-3402 (1977) and Altschul et al., J. Mol. Biol. 215:403-410 (1990), respectively. BLAST and BLAST 2.0 are used, with the parameters described herein, to determine percent sequence identity for the nucleic acids and proteins of the invention. Software for performing BLAST analyses is publicly available through the National Center for Biotechnology Information website. This algorithm involves first identifying high scoring sequence pairs (HSPs) by identifying short words of length W in the query sequence, which either match or satisfy some positive-valued threshold score T when aligned with a word of the same length in a database sequence. T is referred to as the neighborhood word score threshold (Altschul et al., supra). These initial neighborhood word hits act as seeds for initiating searches to find longer HSPs containing them. The word hits are extended in both directions along each sequence for as far as the cumulative alignment score can be increased. Cumulative scores are calculated using, for nucleotide sequences, the parameters M (reward score for a pair of matching residues; always >0) and N (penalty score for mismatching residues; always <0). For amino acid sequences, a scoring matrix is used to calculate the cumulative score. Extension of the word hits in each direction are halted when: the cumulative alignment score falls off by the quantity X from its maximum achieved value; the cumulative score goes to zero or below, due to the accumulation of one or more negative-scoring residue alignments; or the end of either sequence is reached. The BLAST algorithm parameters W, T, and X determine the sensitivity and speed of the alignment. The BLASTN program (for nucleotide sequences) uses as defaults a wordlength (W) of 11, an expectation (E) of 10, M=5, N=−4 and a comparison of both strands. For amino acid sequences, the BLASTP program uses as defaults a wordlength of 3, and expectation (E) of 10, and the BLOSUM62 scoring matrix (see Henikoff & Henikoff, Proc. Natl. Acad. Sci. USA 89:10915 (1989)) alignments (B) of 50, expectation (E) of 10, M=5, N=−4, and a comparison of both strands.

[0049] Another embodiment of the invention also provides nucleic acid molecules that hybridize under stringent conditions to the above-described nucleic acid molecules. As defined above, and as is well known in the art, stringent hybridizations are performed at about 25° C. below the thermal melting point (Tₘ) for the specific DNA hybrid under a particular set of conditions, where the Tₘ is the temperature at which 50% of the target sequence hybridizes to a perfectly matched probe. Stringent washing is performed at temperatures about 5° C. lower than the Tₘ for the specific DNA hybrid under a particular set of conditions.

[0050] Nucleic acid molecules comprising a fragment of any one of the above-described nucleic acid sequences are also provided. These fragments preferably contain at least 20 contiguous nucleotides. More preferably the fragments of the nucleic acid sequences contain at least 25, 30, 35, 40, 45, 50, 60, 70, 80, 90, 100 or even more contiguous nucleotides.

[0051] As is well known in the art, enzyme activities can be measured in various ways. For example, the activity of the enzyme can be followed using chromatographic techniques, such as by high performance liquid chromatography. Chung and Sloan, J. Chromatogr. 371:71-81 (1986). As another alternative the activity can be indirectly measured by determining the levels of product made from the enzyme activity. These levels can be measured with techniques including aqueous chloroform/methanol extraction as known and described in the art (Cf. M. Kates (1986) Techniques of Lipidology; Isolation, analysis and identification of Lipids. Elsevier Science Publishers, New York (ISBN: 0444807322)). More modern techniques include using gas chromatography linked to mass spectrometry (Niessen, W. M. A. (2001). Current practice of gas chromatography—mass spectrometry. New York, N.Y.: Marcel Dekker. (ISBN: 0824704738)). Additional modern techniques for identification of recombinant protein activity and products including liquid chromatography-mass spectrometry (LCMS), high performance liquid chromatography (HPLC), capillary electrophoresis, Matrix-Assisted Laser Desorption Ionization time of flight-mass spectrometry (MALDI-TOF MS), nuclear magnetic resonance (NMR), near-infrared (NIR) spectroscopy, viscometry (Knothe, G., R. O. Dunn, and M. O. Bagby. 1997. Biodiesel: The use of vegetable oils and their derivatives as alternative diesel fuels. Am. Chem. Soc. Symp. Series 666: 172-208), titration for determining free fatty acids (Komers, K., F. Skopal, and R. Stloukal. 1997. Determination of the neutralization number for biodiesel fuel production. Fett/Lipid 99(2): 52-54), enzymatic methods (Bailer, J., and K. de Hueber. 1991. Determination of saponifiable glycerol in “bio-diesel.” Fresenius J. Anal. Chem. 340(3): 186), physical property-based methods, wet chemical methods, etc. can be used to analyze the levels and the identity of the product produced by the organisms of an embodiment of the present invention. Other methods and techniques may also be suitable for the measurement of enzyme activity, as would be known by one of skill in the art.

### Plasmids

[0052] Plasmids relevant to genetic engineering typically include at least two functional elements 1) an origin of replication enabling propagation of the DNA sequence in the host organism, and 2) a selective marker (for example an antibiotic resistance marker conferring resistance to ampicillin, kanamycin, zeocin, chloramphenicol, tetracycline, spectinomycin, and the like). Plasmids are often referred to as “cloning vectors” when their primary purpose is to enable propagation of a desired heterologous DNA insert. Plasmids can also include cis-acting regulatory sequences to direct transcription and translation of heterologous DNA inserts (for example, promoters, transcription terminators, ribosome binding sites); such plasmids are frequently referred to as “expression vectors.” When plasmids contain functional elements that allow for propagation in more than one species, such plasmids are referred to as “shuttle vectors.” Shuttle vectors are well known to those in the art. For example, pSE4 is a shuttle vector that allows propagation in E. coli and Synechococcus [Maeda S, Kawaguchi Y, Ohy T, and Omata T. J. Bacteriol. (1998). 180:4080-4088]. Shuttle vectors are particularly useful in one embodiment of the present invention to allow for facile manipulation of genes and regulatory sequences.

### Vectors

[0053] Also provided are vectors, including expression vectors and cloning vectors, which comprise the above nucleic acid molecules of an embodiment of the present invention. In a first embodiment, the vectors include the isolated nucleic acid molecules described above. In an alternative embodiment, the vectors include the above-described nucleic acid molecules operably linked to one or more expression control sequences. The vectors of the instant invention may thus be used to express an ST and/or TE polypeptide contributing to polypropylene producing activity by a host cell.

[0054] Exemplary vectors of the invention include any of the vectors expressing a thioesterase or sulfotranserase. A gene expressing a thioesterase or sulfotransferase are assembled and inserted into a suitable vector, e.g. pJB5, as described in WO2009/111513, herein incorporated in its entirety by reference. The invention also provides other vectors such as pJB161, as described in WO2009/062190 and U.S. Pat. No. 7,785,861, herein incorporated in their entirety by reference, which are capable of receiving nucleic acid sequences of the invention. Vectors such as pJB161 comprise sequences which are homologous with sequences that are present in plasmids which are endogenous to certain photosynthetic microorganisms (e.g., plasmids pAQ7 or pAQ1 of certain Synechococcus species). Recombination between pJB161 and the endogenous plasmids in vivo yield engineered microbes expressing the genes of interest from their endogenous plasmids. Alternatively, vectors can be engineered to recombine with the host cell chromosome, or the vector can be engineered to replicate and express genes of interest independent of the host cell chromosome or any of the host cell's endogenous plasmids.

[0055] Vectors useful for expression of nucleic acids in prokaryotes are well known in the art.

### Isolated Polypeptides

[0056] According to another aspect of the present invention, isolated polypeptides (including muteins, allelic variants, fragments, derivatives, and analogs) encoded by the nucleic acid molecules are provided. In one embodiment, isolated polypeptides comprising a fragment of the above-described polypeptide sequences are provided. These fragments preferably include at least 20 contiguous amino acids, more preferably at least 25, 30, 35, 40, 45, 50, 60, 70, 80, 90, 100 or even more contiguous amino acids.

[0057] The polypeptides of an embodiment of the present invention also include fusions between the above-described polypeptide sequences and heterologous polypeptides. The heterologous sequences can, for example, include sequences designed to facilitate purification, e.g. histidine tags, and/or visualization of recombinantly-expressed proteins. Other non-limiting examples of protein fusions include those that permit display of the encoded protein on the surface of a phage or a cell, fusions to intrinsically fluorescent proteins, such as green fluorescent protein (GFP), and fusions to the IgG Fc region.

### Host Cell Transformants

[0058] In another aspect of the present invention, host cells transformed with the nucleic acid molecules or vectors of an embodiment of the present invention, and descendants thereof, are provided. In some embodiments of the present invention, these cells carry the nucleic acid sequences of an embodiment of the present invention on vectors, which may but need not be freely replicating vectors. In other embodiments of the present invention, the nucleic acids have been integrated into the genome of the host cells.

[0059] In a preferred embodiment, the host cell comprises one or more ST and/or TE encoding nucleic acids which express ST and/or TE activity in the host cell.

[0060] In an alternative embodiment, the host cells of an embodiment of the present invention are mutated by recombination with a disruption, deletion or mutation of the isolated nucleic acid of the present invention so that the activity of the ST and/or TE protein(s) in the host cell is reduced or eliminated compared to a host cell lacking the mutation.

### Selected or Engineered Microorganisms For the Production of Carbon-Based Products of Interest

[0061] Microorganism: Includes prokaryotic and eukaryotic microbial species from the Domains Archaea, Bacteria and Eucarya, the latter including yeast and filamentous fungi, protozoa, algae, or higher Protista. The terms “microbial cells” and “microbes” are used interchangeably with the term microorganism.

[0062] A variety of host organisms can be transformed to produce a product of interest. Photoautotrophic organisms include eukaryotic plants and algae, as well as prokaryotic cyanobacteria, green-sulfur bacteria, green non-sulfur bacteria, purple sulfur bacteria, and purple non-sulfur bacteria.

[0063] Extremophiles are also contemplated as suitable organisms. Such organisms withstand various environmental parameters such as temperature, radiation, pressure, gravity, vacuum, desiccation, salinity, pH, oxygen tension, and chemicals. They include hyperthermophiles, which grow at or above 80° C. such as Pyrolobus fumarii; thermophiles, which grow between 60-80° C. such as Synechococcus lividis; mesophiles, which grow between 15-60° C. and psychrophiles, which grow at or below 15° C. such as Psychrobacter and some insects. Radiation tolerant organisms include Deinococcus radiodurans. Pressure tolerant organisms include piezophiles, which tolerate pressure of 130 MPa. Weight tolerant organisms include barophiles. Hypergravity (e.g., >1 g) hypogravity (e.g., <1 g) tolerant organisms are also contemplated. Vacuum tolerant organisms include tardigrades, insects, microbes and seeds. Dessicant tolerant and anhydrobiotic organisms include xerophiles such as Artemia salina; nematodes, microbes, fungi and lichens. Salt tolerant organisms include halophiles (e.g., 2-5 M NaCl) Halobacteriacea and Dunaliella salina. pH tolerant organisms include alkaliphiles such as Natronobacterium, Bacillus firmus OF4, Spirulina spp. (e.g., pH>9) and acidophiles such as Cyanidium caldarium, Ferroplasma sp. (e.g., low pH). Anaerobes, which cannot tolerate O₂ such as Methanococcus jannaschii; microaerophils, which tolerate some O₂ such as Clostridium and aerobes, which require O₂ are also contemplated. Gas tolerant organisms, which tolerate pure CO₂ include Cyanidium caldarium and metal tolerant organisms include metalotolerants such as Ferroplasma acidarmanus (e.g., Cu, As, Cd, Zn), Ralstonia sp. CH34 (e.g., Zn, Co, Cd, Hg, Pb). Gross, Michael. Life on the Edge: Amazing Creatures Thriving in Extreme Environments. New York: Plenum (1998) and Seckbach, J. “Search for Life in the Universe with Terrestrial Microbes Which Thrive Under Extreme Conditions.” In Cristiano Batalli Cosmovici, Stuart Bowyer, and Dan Wertheimer, eds., Astronomical and Biochemical Origins and the Search for Life in the Universe, p. 511. Milan: Editrice Compositori (1997).

[0064] Plants include but are not limited to the following genera: Arabidopsis, Beta, Glycine, Jatropha, Miscanthus, Panicum, Phalaris, Populus, Saccharum, Salix, Simmondsia and Zea.

[0065] Algae and cyanobacteria include but are not limited to the following genera:

[0066] Acanthoceras, Acanthococcus, Acaryochloris, Achnanthes, Achnanthidium, Actinastrum, Actinochloris, Actinocyclus, Actinotaenium, Amphichrysis, Amphidinium, Amphikrikos, Amphipleura, Amphiprora, Amphithrix, Amphora, Anabaena, Anabaenopsis, Aneumastus, Ankistrodesmus, Ankyra, Anomoeoneis, Apatococcus, Aphanizomenon, Aphanocapsa, Aphanochaete, Aphanothece, Apiocystis, Apistonema, Arthrodesmus, Artherospira, Ascochloris, Asterionella, Asterococcus, Audouinella, Aulacoseira, Bacillaria, Balbiania, Bambusina, Bangia, Basichlamys, Batrachospermum, Binuclearia, Bitrichia, Blidingia, Botrdiopsis, Botrydium, Botryococcus, Botryosphaerella, Brachiomonas, Brachysira, Brachytrichia, Brebissonia, Bulbochaete, Bumilleria, Bumilleriopsis, Caloneis, Calothrix, Campylodiscus, Capsosiphon, Carteria, Catena, Cavinula, Centritractus, Centronella, Ceratium, Chaetoceros, Chaetochloris, Chaetomorpha, Chaetonella, Chaetonema, Chaetopeltis, Chaetophora, Chaetosphaeridium, Chamaesiphon, Chara, Characiochloris, Characiopsis, Characium, Charales, Chilomonas, Chlainomonas, Chlamydoblepharis, Chlamydocapsa, Chlamydomonas, Chlamydomonopsis, Chlamydomyxa, Chlamydonephris, Chlorangiella, Chlorangiopsis, Chlorella, Chlorobotrys, Chlorobrachis, Chlorochytrium, Chlorococcum, Chlorogloea, Chlorogloeopsis, Chlorogonium, Chlorolobion, Chloromonas, Chlorophysema, Chlorophyta, Chlorosaccus, Chlorosarcina, Choricystis, Chromophyton, Chromulina, Chroococcidiopsis, Chroococcus, Chroodactylon, Chroomonas, Chroothece, Chrysamoeba, Chrysapsis, Chrysidiastrum, Chrysocapsa, Chrysocapsella, Chrysochaete, Chrysochromulina, Chrysococcus, Chrysocrinus, Chrysolepidomonas, Chrysolykos, Chrysonebula, Chrysophyta, Chrysopyxis, Chrysosaccus, Chrysophaerella, Chrysostephanosphaera, Clodophora, Clastidium, Closteriopsis, Closterium, Coccomyxa, Cocconeis, Coelastrella, Coelastrum, Coelosphaerium, Coenochloris, Coenococcus, Coenocystis, Colacium, Coleochaete, Collodictyon, Compsogonopsis, Compsopogon, Conjugatophyta, Conochaete, Coronastrum, Cosmarium, Cosmioneis, Cosmocladium, Crateriportula, Craticula, Crinalium, Crucigenia, Crucigeniella, Cryptoaulax, Cryptomonas, Cryptophyta, Ctenophora, Cyanodictyon, Cyanonephron, Cyanophora, Cyanophyta, Cyanothece, Cyanothomonas, Cyclonexis, Cyclostephanos, Cyclotella, Cylindrocapsa, Cylindrocystis, Cylindrospermum, Cylindrotheca, Cymatopleura, Cymbella, Cymbellonitzschia, Cystodinium Dactylococcopsis, Debarya, Denticula, Dermatochrysis, Dermocarpa, Dermocarpella, Desmatractum, Desmidium, Desmococcus, Desmonema, Desmosiphon, Diacanthos, Diacronema, Diadesmis, Diatoma, Diatomella, Dicellula, Dichothrix, Dichotomococcus, Dicranochaete, Dictyochloris, Dictyococcus, Dictyosphaerium, Didymocystis, Didymogenes, Didymosphenia, Dilabifilum, Dimorphococcus, Dinobryon, Dinococcus, Diplochloris, Diploneis, Diplostauron, Distrionella, Docidium, Draparnaldia, Dunaliella, Dysmorphococcus, Ecballocystis, Elakatothrix, Ellerbeckia, Encyonema, Enteromorpha, Entocladia, Entomoneis, Entophysalis, Epichrysis, Epipyxis, Epithemia, Eremosphaera, Euastropsis, Euastrum, Eucapsis, Eucocconeis, Eudorina, Euglena, Euglenophyta, Eunotia, Eustigmatophyta, Eutreptia, Fallacia, Fischerella, Fragilaria, Fragilariforma, Franceia, Frustulia, Curcilla, Geminella, Genicularia, Glaucocystis, Glaucophyta, Glenodiniopsis, Glenodinium, Gloeocapsa, Gloeochaete, Gloeochrysis, Gloeococcus, Gloeocystis, Gloeodendron, Gloeomonas, Gloeoplax, Gloeothece, Gloeotila, Gloeotrichia, Gloiodictyon, Golenkinia, Golenkiniopsis, Gomontia, Gomphocymbella, Gomphonema, Gomphosphaeria, Gonatozygon, Gongrosia, Gongrosira, Goniochloris, Gonium, Gonyostomum, Granulochloris, Granulocystopsis, Groenbladia, Gymnodinium, Gymnozyga, Gyrosigma, Haematococcus, Hafniomonas, Hallassia, Hammatoidea, Hannaea, Hantzschia, Hapalosiphon, Haplotaenium, Haptophyta, Haslea, Hemidinium, Hemitoma, Heribaudiella, Heteromastix, Heterothrix, Hibberdia, Hildenbrandia, Hillea, Holopedium, Homoeothrix, Hormanthonema, Hormotila, Hyalobrachion, Hyalocardium, Hyalodiscus, Hyalogonium, Hyalotheca, Hydrianum, Hydrococcus, Hydrocoleum, Hydrocoryne, Hydrodictyon, Hydrosera, Hydrurus, Hyella, Hymenomonas, Isthmochloron, Johannesbaptistia, Juranyiella, Karayevia, Kathablepharis, Katodinium, Kephyrion, Keratococcus, Kirchneriella, Klebsormidium, Kolbesia, Koliella, Komarekia, Korshikoviella, Kraskella, Lagerheimia, Lagynion, Lamprothamnium, Lemanea, Lepocinclis, Leptosira, Lobococcus, Lobocystis, Lobomonas, Luticola, Lyngbya, Malleochloris, Mallomonas, Mantoniella, Marssoniella, Martyana, Mastigocoleus, Gastogloia, Melosira, Merismopedia, Mesostigma, Mesotaenium, Micractinium, Micrasterias, Microchaete, Microcoleus, Microcystis, Microglena, Micromonas, Microspora, Microthamnion, Mischococcus, Monochrysis, Monodus, Monomastix, Monoraphidium, Monostroma, Mougeotia, Mougeotiopsis, Myochloris, Myromecia, Myxosarcina, Naegeliella, Nannochloris, Nautococcus, Navicula, Neglectella, Neidium, Nephroclamys, Nephrocytium, Nephrodiella, Nephroselmis, Netrium, Nitella, Nitellopsis, Nitzschia, Nodularia, Nostoc, Ochromonas, Oedogonium, Oligochaetophora, Onychonema, Oocardium, Oocystis, Opephora, Ophiocytium, Orthoseira, Oscillatoria, Oxyneis, Pachycladella, Palmella, Palmodictyon, Pnadorina, Pannus, Paralia, Pascherina, Paulschulzia, Pediastrum, Pedinella, Pedinomonas, Pedinopera, Pelagodictyon, Penium, Peranema, Peridiniopsis, Peridinium, Peronia, Petroneis, Phacotus, Phacus, Phaeaster, Phaeodermatium, Phaeophyta, Phaeosphaera, Phaeothamnion, Phormidium, Phycopeltis, Phyllariochloris, Phyllocardium, Phyllomitas, Pinnularia, Pitophora, Placoneis, Planctonema, Planktosphaeria, Planothidium, Plectonema, Pleodorina, Pleurastrum, Pleurocapsa, Pleurocladia, Pleurodiscus, Pleurosigma, Pleurosira, Pleurotaenium, Pocillomonas, Podohedra, Polyblepharides, Polychaetophora, Polyedriella, Polyedriopsis, Polygoniochloris, Polyepidomonas, Polytaenia, Polytoma, Polytomella, Porphyridium, Posteriochromonas, Prasinochloris, Prasinocladus, Prasinophyta, Prasiola, Prochlorphyta, Prochlorothrix, Protoderma, Protosiphon, Provasoliella, Prymnesium, Psammodictyon, Psammothidium, Pseudanabaena, Pseudenoclonium, Psuedocarteria, Pseudochate, Pseudocharacium, Pseudococcomyxa, Pseudodictyosphaerium, Pseudokephyrion, Pseudoncobyrsa, Pseudoquadrigula, Pseudosphaerocystis, Pseudostaurastrum, Pseudostaurosira, Pseudotetrastrum, Pteromonas, Punctastruata, Pyramichlamys, Pyramimonas, Pyrrophyta, Quadrichloris, Quadricoccus, Quadrigula, Radiococcus, Radiofilum, Raphidiopsis, Raphidocelis, Raphidonema, Raphidophyta, Peimeria, Rhabdoderma, Rhabdomonas, Rhizoclonium, Rhodomonas, Rhodophyta, Rhoicosphenia, Rhopalodia, Rivularia, Rosenvingiella, Rossithidium, Roya, Scenedesmus, Scherffelia, Schizochlamydella, Schizochlamys, Schizomeris, Schizothrix, Schroederia, Scolioneis, Scotiella, Scotiellopsis, Scourfieldia, Scytonema, Selenastrum, Selenochloris, Sellaphora, Semiorbis, Siderocelis, Diderocystopsis, Dimonsenia, Siphononema, Sirocladium, Sirogonium, Skeletonema, Sorastrum, Spermatozopsis, Sphaerellocystis, Sphaerellopsis, Sphaerodinium, Sphaeroplea, Sphaerozosma, Spiniferomonas, Spirogyra, Spirotaenia, Spirulina, Spondylomorum, Spondylosium, Sporotetras, Spumella, Staurastrum, Stauerodesmus, Stauroneis, Staurosira, Staurosirella, Stenopterobia, Stephanocostis, Stephanodiscus, Stephanoporos, Stephanosphaera, Stichococcus, Stichogloea, Stigeoclonium, Stigonema, Stipitococcus, Stokesiella, Strombomonas, Stylochrysalis, Stylodinium, Styloyxis, Stylosphaeridium, Surirella, Sykidion, Symploca, Synechococcus, Synechocystis, Synedra, Synochromonas, Synura, Tabellaria, Tabularia, Teilingia, Temnogametum, Tetmemorus, Tetrachlorella, Tetracyclus, Tetradesmus, Tetraedriella, Tetraedron, Tetraselmis, Tetraspora, Tetrastrum, Thalassiosira, Thamniochaete, Thorakochloris, Thorea, Tolypella, Tolypothrix, Trachelomonas, Trachydiscus, Trebouxia, Trentepholia, Treubaria, Tribonema, Trichodesmium, Trichodiscus, Trochiscia, Tryblionella, Ulothrix, Uroglena, Uronema, Urosolenia, Urospora, Uva, Vacuolaria, Vaucheria, Volvox, Volvulina, Westella, Woloszynskia, Xanthidium, Xanthophyta, Xenococcus, Zygnema, Zygnemopsis, and Zygonium.

[0067] Green non-sulfur bacteria include but are not limited to the following genera: Chloroflexus, Chloronema, Oscillochloris, Heliothrix, Herpetosiphon, Roseiflexus, and Thermomicrobium.

[0068] Green sulfur bacteria include but are not limited to the following genera:

[0069] Chlorobium, Clathrochloris, and Prosthecochloris.

[0070] Purple sulfur bacteria include but are not limited to the following genera: Allochromatium, Chromatium, Halochromatium, Isochromatium, Marichromatium, Rhodovulum, Thermochromatium, Thiocapsa, Thiorhodococcus, and Thiocystis.

[0071] Purple non-sulfur bacteria include but are not limited to the following genera: Phaeospirillum, Rhodobaca, Rhodobacter, Rhodomicrobium, Rhodopila, Rhodopseudomonas, Rhodothalassium, Rhodospirillum, Rodovibrio, and Roseospira.

[0072] Aerobic chemolithotrophic bacteria include but are not limited to nitrifying bacteria such as Nitrobacteraceae sp., Nitrobacter sp., Nitrospina sp., Nitrococcus sp., Nitrospira sp., Nitrosomonas sp., Nitrosococcus sp., Nitrosospira sp., Nitrosolobus sp., Nitrosovibrio sp.; colorless sulfur bacteria such as, Thiovulum sp., Thiobacillus sp., Thiomicrospira sp., Thiosphaera sp., Thermothrix sp.; obligately chemolithotrophic hydrogen bacteria such as Hydrogenobacter sp., iron and manganese-oxidizing and/or depositing bacteria such as Siderococcus sp., and magnetotactic bacteria such as Aquaspirillum sp.

[0073] Archaeobacteria include but are not limited to methanogenic archaeobacteria such as Methanobacterium sp., Methanobrevibacter sp., Methanothermus sp., Methanococcus sp., Methanomicrobium sp., Methanospirillum sp., Methanogenium sp., Methanosarcina sp., Methanolobus sp., Methanothrix sp., Methanococcoides sp., Methanoplanus sp.; extremely thermophilic S°-Metabolizers such as Thermoproteus sp., Pyrodictium sp., Sulfolobus sp., Acidianus sp. and other microorganisms such as, Bacillus subtilis, Saccharomyces cerevisiae, Streptomyces sp., Ralstonia sp., Rhodococcus sp., Corynebacteria sp., Brevibacteria sp., Mycobacteria sp., and oleaginous yeast.

[0074] HyperPhotosynthetic conversion requires extensive genetic modification; thus, in preferred embodiments the parental photoautotrophic organism can be transformed with exogenous DNA.

[0075] Preferred organisms for HyperPhotosynthetic conversion include: Arabidopsis thaliana, Panicum virgatum, Miscanthus giganteus, and Zea mays (plants), Botryococcus braunii, Chlamydomonas reinhardtii and Dunaliela salina (algae), Synechococcus sp PCC 7002, Synechococcus sp. PCC 7942, Synechocystis sp. PCC 6803, and Thermosynechococcus elongatus BP-1 (cyanobacteria), Chlorobium tepidum (green sulfur bacteria), Chloroflexus auranticus (green non-sulfur bacteria), Chromatium tepidum and Chromatium vinosum (purple sulfur bacteria), Rhodospirillum rubrum, Rhodobacter capsulatus, and Rhodopseudomonas palusris (purple non-sulfur bacteria).

[0076] Yet other suitable organisms include synthetic cells or cells produced by synthetic genomes as described in Venter et al. US Pat. Pub. No. 2007/0264688, and cell-like systems or synthetic cells as described in Glass et al. US Pat. Pub. No. 2007/0269862.

[0077] Still, other suitable organisms include microorganisms that can be engineered to fix carbon dioxide bacteria such as Escherichia coli, Acetobacter aceti, Bacillus subtilis, yeast and fungi such as Clostridium ljungdahlii, Clostridium thermocellum, Penicillium chrysogenum, Pichia pastoris, Saccharomyces cerevisiae, Schizosaccharomyces pombe, Pseudomonas fluorescens, or Zymomonas mobilis.

[0078] A common theme in selecting or engineering a suitable organism is autotrophic fixation of CO₂ to products. This would cover photosynthesis and methanogenesis. Acetogenesis, encompassing the three types of CO₂ fixation; Calvin cycle, acetyl CoA pathway and reductive TCA pathway is also covered. The capability to use carbon dioxide as the sole source of cell carbon (autotrophy) is found in almost all major groups of prokaryotes. The CO₂ fixation pathways differ between groups, and there is no clear distribution pattern of the four presently-known autotrophic pathways. Fuchs, G. 1989. Alternative pathways of autotrophic CO₂ fixation, p. 365-382. In H. G. Schlegel, and B. Bowien (ed.), Autotrophic bacteria. Springer-Verlag, Berlin, Germany. The reductive pentose phosphate cycle (Calvin-Bassham-Benson cycle) represents the CO₂ fixation pathway in almost all aerobic autotrophic bacteria, for example, the cyanobacteria.

[0079] The host cell of one embodiment of the present invention is preferably Escherichia coli, Synechococcus, Thermosynechococcus, Synechocystis, Klebsiella oxytoca, or Saccharomyces cerevisiae but other prokaryotic, archaea and eukaryotic host cells including those of the cyanobacteria are also encompassed within the scope of the present invention.

### Hydroxyacyl Substrates

[0080] The compositions and methods described herein can be used to produce olefins (e.g., terminal olefins) from hydroxyacyl substrates. While not wishing to be bound by theory it is believed that the polypeptides described herein produce olefins from hydroxyacyl substrates via a sulfotransferase and thioesterase mechanism. Thus, olefins having particular branching patterns, levels of saturation, and carbon chain length can be produced from hydroxyacyl substrates having those particular characteristics. Accordingly, each step within a hydroxyacyl related pathway can be modified to produce or overproduce a hydroxyacyl substrate of interest.

### Producing Terminal Olefins Using Cell-Free Methods

[0081] Some methods described herein, a terminal olefin can be produced using a purified polypeptide described herein and a hydroxyacyl substrate. For example, a host cell can be engineered to express a polypeptide (e.g. a NonA polypeptide or a variant thereof) as described herein. The host cell can be cultured under conditions suitable to allow expression of the polypeptide. Cell free extracts can then be generated using known methods. For example, the host cells can be lysed using detergents or by sonication. The expressed polypeptides can be purified using known methods. After obtaining the cell free extracts, hydroxyacyl substrates described herein can be added to the cell free extracts and maintained under conditions to allow conversion of hydroxyacyl substrates to terminal olefins. The terminal olefins can be separated and purified using known techniques.

[0082] The following examples are for illustrative purposes and are not intended to limit the scope of the present invention.

### Example 1

### A Pathway for the Enzymatic Synthesis of Terminal Olefins from 3-Hydroxyacyl Substrates

[0083] The nonA gene in Synechococcus elongatus PCC 7002 has been discovered by us to be responsible for synthesis of 1-nonadecene and other long-chain terminal olefins, as described in PCT/US2010/039558, herein incorporated by reference in its entirety. This newly discovered enzymatic activity is attributed to ST and TE domains present in the enzyme expressed by this gene. In this example, we express ST and TE domains of a protein such as L. majuscula CurM or S. elongatus PCC 7002 NonA in a host cell to convert 3-hydroxyacyl substrates to the corresponding terminal olefins, e.g. propylene.

### Example 2

### A Pathway for the Enzymatic Synthesis of Propylene

[0084] In this example, we use recombinant or endogenous ST and TE activity to convert 3-hydroxybutyryl-ACP or 3-hydroxybutyryl-CoA to propylene and CO₂ with the help of the cofactor 3′-phosphate 5′-phosphosulfate (PAPS), which occurs widely in bacterial and other biological systems (FIG. 1).

[0085] To obtain 3-hydroxybutyryl-CoA, we express R. eutropha phaA and phaB in the host cell, whose gene products together convert 2 acetyl-CoA molecules to 3-hydroxybutyryl-CoA and CoA, using NADPH as a cofactor.

[0086] To obtain 3-hydroxybutyryl-ACP, we utilize a host with attenuated 3-hydroxyacyl-ACP dehydratase (EC 4.2.1.59 and/or EC 4.2.1.58) activity while feeding long-chain fatty acids to enable lipid synthesis. In an alternative embodiment, the 3-hydroxyacyl-ACP dehydratase is placed under inducible control and expressed only under growth conditions. This allows fatty acid biosynthesis to proceed only to 3-hydroxybutyryl-ACP while still allowing the cell to grow. In this way, one obtains a pathway from acetyl-CoA to propylene.

### Example 3

### Homologous ST and TE Domains

[0087] The sequences of the ST and TE domains of the Synechococcus elongatus sp. PCC7002 NonA protein (SEQ ID NO:1) were used to perform an amino acid sequence search for homologous proteins using BLAST. Proteins homologous to the region of the protein comprising both ST and TE domains are listed in Table 1 (SEQ ID NOS 4-11, respectively, in order of appearance). Sequences homologous to only the NonA ST domain protein sequence (SEQ ID NO:2) are listed in Table 2 (SEQ ID NOS 12-19, respectively, in order of appearance). Sequences homologous to only the NonA TE domain protein sequence (SEQ ID NO:3) are listed in Table 3 (SEQ ID NOS 20-104, respectively, in order of appearance). At least one of the protein sequences of Tables 1-3 (SEQ ID NOS 4-104, respectively, in order of appearance) is engineered into a host cell, e.g. cyanobacterium, according to standard genetic engineering techniques. The engineered host cell has an increased capacity to synthesize terminal olefins, e.g. propylene.

TABLE 1
Proteins showing homology to both ST and TE domains of NonA.

| SEQ ID NO: | Protein ID | GenBank-annotated function | Organism |
|---|---|---|---|
| 4 | YP_001734428.1 | polyketide synthase | Synechococcus sp. PCC 7002 |
| 5 | YP_002377174.1 | beta-ketoacyl synthase | Cyanothece sp. PCC 7424 |
| 6 | YP_003887107.1 | beta-ketoacyl synthase | Cyanothece sp. PCC 7822 |
| 7 | ACV42478.1 | polyketide synthase | Lyngbya majuscula 19L |
| 8 | AAT70108.1 | CurM | Lyngbya majuscula |
| 9 | YP_610919.1 | polyketide synthase | Pseudomonas entomophila L48 |
| 10 | YP_003265308.1 | KR domain protein | Haliangium ochraceum DSM |
| | | | 14365 |
| 11 | XP_002507643.1 | modular polyketide synthase | Micromonas sp. RCC299 |
| | | type I | |

TABLE 2
Proteins showing homology to only the ST domain of NonA.

| SEQ ID NO: | Protein ID | GenBank-annotated function | Organism |
|---|---|---|---|
| 12 | YP_001062692.1 | CurM | Burkholderia pseudomallei 668 |
| 13 | ABW84363.1 | OciA | Planktothrix agardhii NIES-205 |
| 14 | ABI26077.1 | OciA | Planktothrix agardhii NIVA-CYA |
| | | | 116 |
| 15 | YP_003137597.1 | amino acid adenylation | Cyanothece sp. PCC 8802 |
| | | domain protein | |
| 16 | YP_002372038.1 | amino acid adenylation | Cyanothece sp. PCC 8801 |
| | | domain protein | |
| 17 | XP_003074830.1 | COG3321: Polyketide | Ostreococcus tauri |
| | | synthase modules and related | |
| | | proteins (ISS) | |
| 18 | XP_001416378.1 | polyketide synthase | Ostreococcus lucimarinus |
| | | | CCE9901 |
| 19 | ZP_03631565.1 | amino acid adenylation | bacterium Ellin514 |
| | | domain protein | |

TABLE 3
Proteins showing homology to only the TE domain of NonA.

| SEQ ID NO: | Protein ID | GenBank-annotated function | Organism |
|---|---|---|---|
| 20 | YP_001734428.1 | polyketide synthase | Synechococcus sp. PCC |
| | | | 7002 |
| 21 | AAC14106.1 | epoxide hydroxylase | Synechococcus sp. PCC |
| | | | 7002 |
| 22 | YP_433651.1 | alpha/beta superfamily | Hahella chejuensis KCTC |
| | | hydrolase/acyltransferase | 2396 |
| 23 | YP_001769292.1 | alpha/beta hydrolase fold | Methylobacterium sp. 4- |
| | | | 46 |
| 24 | YP_003269090.1 | alpha/beta hydrolase fold protein | Haliangium ochraceum |
| | | | DSM 14365 |
| 25 | ZP_01916760.1 | Alpha/beta hydrolase fold protein | Limnobacter sp. MED105 |
| 26 | YP_933620.1 | hydrolase or acytransferase | Azoarcus sp. BH72 |
| 27 | YP_158988.1 | putative hydrolase | Aromatoleum aromaticum |
| | | | EbN1 |
| 28 | YP_003776671.1 | hydrolase | Herbaspirillum |
| | | | seropedicae SmR1 |
| 29 | BAI49930.1 | putative esterase | uncultured microorganism |
| 30 | YP_662370.1 | alpha/beta hydrolase fold | Pseudoalteromonas |
| | | | atlantica T6c |
| 31 | ZP_01459983.1 | lipase A | Stigmatella aurantiaca |
| | | | DW4/3-1 |
| 32 | YP_634109.1 | alpha/beta fold family hydrolase | Myxococcus xanthus DK |
| | | | 1622 |
| 33 | ZP_01615147.1 | alpha/beta hydrolase | marine gamma |
| | | | proteobacterium |
| | | | HTCC2143 |
| 34 | YP_001352966.1 | alpha/beta fold family hydrolase | Janthinobacterium sp. |
| | | | Marseille |
| 35 | ZP_01307598.1 | hydrolase, alpha/beta fold family | Oceanobacter sp. RED65 |
| | | protein | |
| 36 | YP_001100441.1 | putative hydrolase protein | Herminiimonas |
| | | | arsenicoxydans |
| 37 | EFP65715.1 | alpha/beta hydrolase family protein | Ralstonia sp. 5_7_47FAA |
| 38 | YP_002981038.1 | alpha/beta hydrolase fold protein | Ralstonia pickettii 12D |
| 39 | YP_001898558.1 | alpha/beta hydrolase fold | Ralstonia pickettii 12J |
| 40 | YP_001172415.1 | hydrolase | Pseudomonas stutzeri |
| | | | A1501 |
| 41 | YP_002354112.1 | alpha/beta hydrolase fold protein | Thauera sp. MZ1T |
| 42 | ZP_05040720.1 | hydrolase, alpha/beta fold family, | Alcanivorax sp. DG881 |
| | | putative | |
| 43 | YP_001021961.1 | putative hydrolase protein | Methylibium |
| | | | petroleiphilum PM1 |
| 44 | YP_002030374.1 | alpha/beta hydrolase fold | Stenotrophomonas |
| | | | maltophilia R551-3 |
| 45 | ZP_01126880.1 | Alpha/beta hydrolase fold protein | Nitrococcus mobilis Nb- |
| | | | 231 |
| 46 | YP_001974273.1 | putative alpha/beta fold hydrolase | Stenotrophomonas |
| | | family protein | maltophilia K279a |
| 47 | YP_286430.1 | Alpha/beta hydrolase fold | Dechloromonas aromatica |
| | | | RCB |
| 48 | YP_001990203.1 | alpha/beta hydrolase fold | Rhodopseudomonas |
| | | | palustris TIE-1 |
| 49 | YP_917027.1 | alpha/beta hydrolase fold | Paracoccus denitrificans |
| | | | PD1222 |
| 50 | YP_002005206.1 | putative Alpha/beta fold hydrolase | Cupriavidus taiwanensis |
| 51 | YP_283592.1 | Alpha/beta hydrolase fold | Dechloromonas aromatica |
| | | | RCB |
| 52 | YP_001349005.1 | putative hydrolase | Pseudomonas aeruginosa |
| | | | PA7 |
| 53 | YP_001187947.1 | alpha/beta hydrolase fold | Pseudomonas mendocina |
| | | | ymp |
| 54 | ZP_04576152.1 | hydrolase | Oxalobacter formigenes |
| | | | HOxBLS |
| 55 | NP_250313.1 | probable hydrolase | Pseudomonas aeruginosa |
| | | | PAO1 |
| 56 | NP_900963.1 | hydrolase | Chromobacterium |
| | | | violaceum ATCC 12472 |
| 57 | AAT50924.1 | PA1622 | synthetic construct |
| 58 | YP_725707.1 | alpha/beta superfamily | Ralstonia eutropha H16 |
| | | hydrolase/acyltransferase | |
| 59 | YP_001554328.1 | alpha/beta hydrolase fold | Shewanella baltica OS195 |
| 60 | YP_002441288.1 | putative hydrolase | Pseudomonas aeruginosa |
| | | | LESB58 |
| 61 | YP_693203.1 | hydrolase | Alcanivorax borkumensis |
| | | | SK2 |
| 62 | YP_002798221.1 | alpha/beta hydrolase | Azotobacter vinelandii DJ |
| 63 | NP_001079604.1 | serine hydrolase-like 2 | Xenopus laevis |
| 64 | NP_946347.1 | Alpha/beta hydrolase fold | Rhodopseudomonas |
| | | | palustris CGA009 |
| 65 | YP_870022.1 | alpha/beta hydrolase fold | Shewanella sp. ANA-3 |
| 66 | YP_295320.1 | Alpha/beta hydrolase fold | Ralstonia eutropha |
| | | | JMP134 |
| 67 | YP_001982425.1 | hydrolase, alpha/beta fold family | Cellvibrio japonicus |
| | | | Ueda107 |
| 68 | YP_963643.1 | alpha/beta hydrolase fold | Shewanella sp. W3-18-1 |
| 69 | ZP_06358651.1 | alpha/beta hydrolase fold protein | Rhodopseudomonas |
| | | | palustris DX-1 |
| 70 | YP_001366096.1 | alpha/beta hydrolase fold | Shewanella baltica OS185 |
| 71 | ZP_01707636.1 | alpha/beta hydrolase fold | Shewanella putrefaciens |
| | | | 200 |
| 72 | YP_734308.1 | alpha/beta hydrolase fold | Shewanella sp. MR-4 |
| 73 | ZP_04957287.1 | hydrolase | gamma proteobacterium |
| | | | NOR51-B |
| 74 | NP_718168.1 | alpha/beta fold family hydrolase | Shewanella oneidensis |
| | | | MR-1 |
| 75 | YP_003146580.1 | alpha/beta hydrolase fold protein | Kangiella koreensis DSM |
| | | | 16069 |
| 76 | YP_568320.1 | alpha/beta hydrolase fold | Rhodopseudomonas |
| | | | palustris BisB5 |
| 77 | YP_001183284.1 | alpha/beta hydrolase fold | Shewanella putrefaciens |
| | | | CN-32 |
| 78 | ZP_05134273.1 | hydrolase of the alpha/beta fold | Stenotrophomonas sp. |
| | | superfamily | SKA14 |
| 79 | YP_003545632.1 | putative alpha/beta hydrolase | Sphingobium japonicum |
| | | | UT26S |
| 80 | YP_002358347.1 | alpha/beta hydrolase fold protein | Shewanella baltica OS223 |
| 81 | YP_856727.1 | alpha/beta fold family hydrolase | Aeromonas hydrophila |
| | | | subsp. hydrophila ATCC |
| | | | 7966 |
| 82 | XP_003055946.1 | predicted protein | Micromonas pusilla |
| | | | CCMP1545 |
| 83 | ZP_01616002.1 | putative hydrolase | marine gamma |
| | | | proteobacterium |
| | | | HTCC2143 |
| 84 | YP_001411669.1 | alpha/beta hydrolase fold | Parvibaculum |
| | | | lavamentivorans DS-1 |
| 85 | ZP_07392985.1 | alpha/beta hydrolase fold protein | Shewanella baltica OS183 |
| 86 | YP_001050238.1 | alpha/beta hydrolase fold | Shewanella baltica OS155 |
| 87 | YP_002553684.1 | alpha/beta hydrolase fold protein | Acidovorax ebreus TPSY |
| 88 | YP_003165824.1 | alpha/beta hydrolase fold protein | Candidatus |
| | | | Accumulibacter |
| | | | phosphatis clade IIA str. |
| | | | UW-1 |
| 89 | YP_001141910.1 | alpha/beta fold family hydrolase | Aeromonas salmonicida |
| | | | subsp. salmonicida A449 |
| 90 | ZP_04579173.1 | hydrolase | Oxalobacter formigenes |
| | | | OXCC13 |
| 91 | YP_001502304.1 | alpha/beta hydrolase fold | Shewanella pealeana |
| | | | ATCC 700345 |
| 92 | YP_484670.1 | Alpha/beta hydrolase | Rhodopseudomonas |
| | | | palustris HaA2 |
| 93 | YP_001615653.1 | putative hydrolase | Sorangium cellulosum ‘So |
| | | | ce 56’ |
| 94 | YP_003752880.1 | putative Alpha/beta fold hydrolase | Ralstonia solanacearum |
| | | | PSI07 |
| 95 | XP_002192434.1 | PREDICTED: serine hydrolase-like 2 | Taeniopygia guttata |
| 96 | YP_235108.1 | Alpha/beta hydrolase fold | Pseudomonas syringae pv. |
| | | | syringae B728a |
| 97 | YP_002795270.1 | Probable hydrolase | Laribacter hongkongensis |
| | | | HLHK9 |
| 98 | XP_001749708.1 | hypothetical protein | Monosiga brevicollis MX1 |
| 99 | YP_274221.1 | lipase, putative | Pseudomonas syringae pv. |
| | | | phaseolicola 1448A |
| 100 | ZP_02374233.1 | hydrolase, alpha/beta fold family | Burkholderia thailandensis |
| | | protein | TXDOH |
| 101 | YP_003073941.1 | alpha/beta hydrolase family protein | Teredinibacter turnerae |
| | | | T7901 |
| 102 | ZP_00945280.1 | Esterase | Ralstonia solanacearum |
| | | | UW551 |
| 103 | YP_002253305.1 | hydrolase or acyltransferase | Ralstonia solanacearum |
| | | (alpha/beta hydrolase superfamily) | MoIK2 |
| | | protein | |
| 104 | YP_003746098.1 | putative Alpha/beta fold hydrolase | Ralstonia solanacearum |
| | | | CFBP2957 |

INFORMAL SEQUENCE LISTING

SEQ ID NO: 1
Synechococcus elongatus NonA (SYNPCC7002_A1173)
Protein sequence
ST domain is underlined, TE domain is in bold.
MASWSHPQFEKEVHHHHHHGAVGQFANFVDLLQYRAKLQARKTVFSFLADGEAESAALTYGELDQKAQAI
AAFLQANQAQGQRALLLYPPGLEFIGAFLGCLYAGVVAVPAYPPRPNKSFDRLHSIIQDAQAKFALTTTE
LKDKIADRLEALEGTDFHCLATDQVELISGKNWQKPNISGTDLAFLQYTSGSTGDPKGVMVSHHNLIHNS
GLINQGFQDTEASMGVSWLPPYHDMGLIGGILQPIYVGATQILMPPVAFLQRPFRWLKAINDYRVSTSGA
PNFAYDLCASQITPEQIRELDLSCWRLAFSGAEPIRAVTLENFAKTFATAGFQKSAFYPCYGMAETTLIV
SGGNGRAQLPQEIIVSKQGIEANQVRPAQGTETTVTLVGSGEVIGDQIVKIVDPQALTECTVGEIGEVWV
KGESVAQGYWQKPDLTQQQFQGNVGAETGFLRTGDLGFLQGGELYITGRLKDLLIIRGRNHYPQDIELTV
EVAHPALRQGAGAAVSVDVNGEEQLVIVQEVERKYARKLNVAAVAQAIRGAIAAEHQLQPQAICFIKPGS
IPKTSSGKIRRHACKAGFLDGSLAVVGEWQPSHQKEGKGIGTQAVTPSTTTSTNFPLPDQHQQQIEAWLK
DNIAHRLGITPQQLDETEPFASYGLDSVQAVQVTADLEDWLGRKLDPTLAYDYPTIRTLAQFLVQGNQAL
EKIPQVPKIQGKEIAVVGLSCRFPQADNPEAFWELLRNGKDGVRPLKTRWATGEWGGFLEDIDQFEPQFF
GISPREAEQMDPQQRLLLEVTWEALERANIPAESLRHSQTGVFVGISNSDYAQLQVRENNPINPYMGTGN
AHSIAANRLSYFLDLRGVSLSIDTACSSSLVAVHLACQSLINGESELAIAAGVNLILTPDVTQTFTQAGM
MSKTGRCQTFDAEADGYVRGEGCGVVLLKPLAQAERDGDNILAVIHGSAVNQDGRSNGLTAPNGRSQQAV
IRQALAQAGITAADLAYLEAHGTGTPLGDPIEINSLKAVLQTAQREQPCVVGSVKTNIGHLEAAAGIAGL
IKVILSLEHGMIPQHLHFKQLNPRIDLDGLVTIASKDQPWSGGSQKRFAGVSSFGFGGTNAHVIVGDYAQ
QKSPLAPPATQDRPWHLLTLSAKNAQALNALQKSYGDYLAQHPSVDPRDLCLSANTGRSPLKERRFFVFK
QVADLQQTLNQDFLAQPRLSSPAKIAFLFTGQGSQYYGMGQQLYQTSPVFRQVLDECDRLWQTYSPEAPA
LTDLLYGNHNPDLVHETVYTQPLLFAVEYAIAQLWLSWGVTPDFCMGHSVGEYVAACLAGVFSLADGMKL
ITARGKLMHALPSNGSMAAVFADKTVIKPYLSEHLTVGAENGSHLVLSGKTPCLEASIHKLQSQGIKTKP
LKVSHAFHSPLMAPMLAEFREIAEQITFHPPRIPLISNVTGGQIEAEIAQADYWVKHVSQPVKFVQSIQT
LAQAGVNVYLEIGVKPVLLSMGRHCLAEQEAVWLPSLRPHSEPWPEILTSLGKLYEQGLNIDWQTVEAGD
RRRKLILPTYPFQRQRYWFNQGSWQTVETESVNPGPDDLNDWLYQVAWTPLDTLPPAPEPSAKLWLILGD
RHDHQPIEAQFKNAQRVYLGQSNHFPTNAPWEVSADALDNLFTHVGSQNLAGILYLCPPGEDPEDLDEIQ
KQTSGFALQLIQTLYQQKIAVPCWFVTHQSQRVLETDAVTGFAQGGLWGLAQAIALEHPELWGGIIDVDD
SLPNFAQICQQRQVQQLAVRHQKLYGAQLKKQPSLPQKNLQIQPQQTYLVTGGLGAIGRKIAQWLAAAGA
EKVILVSRRAPAADQQTLPTNAVVYPCDLADAAQVAKLFQTYPHIKGIFHAAGTLADGLLQQQTWQKFQT
VAAAKMKGTWHLHRHSQKLDLDFFVLFSSVAGVLGSPGQGNYAAANRGMAAIAQYRQAQGLPALAIHWGP
WAEGGMANSLSNQNLAWLPPPQGLTILEKVLGAQGEMGVFKPDWQNLAKQFPEFAKTHYFAAVIPSAEAV
PPTASIFDKLINLEASQRADYLLDYLRRSVAQILKLEIEQIQSHDSLLDLGMDSLMIMEAIASLKQDLQL
MLYPREIYERPRLDVLTAYLAAEFTKAHDSEAATAAAAIPSQSLSVKTKKQWQKPDHKNPNPIAFILSSP
RSGSTLLRVMLAGHPGLYSPPELHLLPFETMGDRHQELGLSHLGEGLQRALMDLENLTPEASQAKVNQWV
KANTPIADIYAYLQRQAEQRLLIDKSPSYGSDRHILDHSEILFDQAKYIHLVRHPYAVIESFTRLRMDKL
LGAEQQNPYALAESIWRTSNRNILDLGRTVGADRYLQVIYEDLVRDPRKVLTNICDFLGVDFDEALLNPY
SGDRLTDGLHQQSMGVGDPNFLQHKTIDPALADKWRSITLPAALQLDTIQLAETFAYDLPQEPQLTPQTQ
SLPSMVERFVTVRGLETCLCEWGDRHQPLVLLLHGILEQGASWQLIAPQLAAQGYWVVAPDLRGHGKSAH
AQSYSMLDFLADVDALAKQLGDRPFTLVGHSMGSIIGAMYAGIRQTQVEKLILVETIVPNDIDDAETGNH
LTTHLDYLAAPPQHPIFPSLEVAARRLRQATPQLPKDLSAFLTQRSTKSVEKGVQWRWDAFLRTRAGIEF
NGISRRRYLALLKDIQAPITLIYGDQSEFNRPADLQAIQAALPQAQRLTVAGGHNLHFENPQAIAQIVYQ
QLQTPVPKTQGLHHHHHHSAWSHPQFEK
SEQ ID NO:2
Synechococcus elongatus NonA (SYNPCC7002_A1173)
ST domain protein sequence
FILSSPRSGSTLLRVMLAGHPGLYSPPELHLLPFETMGDRHQELGLSHLGEGLQRALMDLENLTPEASQA
KVNQWVKANTPIADIYAYLQRQAEQRLLIDKSPSYGSDRHILDHSEILFDQAKYIHLVRHPYAVIESFTR
LRMDKLLGAEQQNPYALAESIWRTSNRNILDLGRTVGADRYLQVIYEDLVRDPRKVLTNICDFLGVDFDE
ALLNPY
SEQ ID NO:3
Synechococcus elongatus NonA (SYNPCC7002_A1173)
TE domain protein sequence
FVTVRGLETCLCEWGDRHQPLVLLLHGILEQGASWQLIAPQLAAQGYWVVAPDLRGHGKSAHAQSYSMLD
FLADVDALAKQLGDRPFTLVGHSMGSIIGAMYAGIRQTQVEKLILVETIVPNDIDDAETGNHLTTHLDYL
AAPPQHPIFPSLEVAARRLRQATPQLPKDLSAFLTQRSTKSVEKGVQWRWDAFLRTRAGIEFNGISRRRY
LALLKDIQAPITLIYGDQSEFNRPADLQAIQAALPQAQRLTVAGGHNLHFENPQAIAQIV

1. An engineered microbial cell for producing a hydrocarbon, wherein said engineered microbial cell comprises a recombinantly expressed protein selected from Tables 1-3 (SEQ ID NOS 4-104, respectively, in order of appearance), and wherein said cell synthesizes at least one terminal olefin.

2.-7. (canceled)

8. The engineered microbial cell of claim 1, wherein said at least one terminal olefin is propylene.

9. The engineered microbial cell of claim 1, wherein said engineered microbial cell comprises 3-hydroxybutyryl-ACP.

10. (canceled)

11. The engineered microbial cell of claim 9, wherein said engineered microbial cell comprises a recombinant accBCAD gene or a recombinant fabDHG gene.

12. The engineered microbial cell of claim 9, wherein said engineered microbial cell comprises a recombinant 3-hydroxyacyl ACP dehydratase gene, wherein said gene comprises a modification that reduces its expression, comprises a knock-out mutation, or is under the control of an inducible promoter.

13.-14. (canceled)

15. The engineered microbial cell of claim 1, wherein said engineered microbial cell comprises hydroxybutyryl-CoA.

16. (canceled)

17. The engineered microbial cell of claim 7, wherein said engineered microbial cell comprises a recombinant phaA gene or a recombinant phaB gene.

18. (canceled)

19. The engineered microbial cell of claim 3, wherein said propylene is synthesized from acetyl-CoA.

20. The engineered microbial cell of claim 1, wherein said at least one terminal olefin is selected from the group consisting of: ethylene, propylene, butylene, butadiene, isoprene, and 1-nonadecene.

21. The engineered microbial cell of claim 1, wherein said engineered microbial cell comprises a recombinant curM gene.

22. The engineered microbial cell of claim 1, wherein said engineered microbial cell comprises a recombinant nonA gene.

23.-51. (canceled)

52. The engineered microbial cell of claim 1, wherein said recombinantly expressed protein comprises a recombinant sulfotransferase protein activity and/or a recombinant thioesterase protein activity.

53. A method for producing a terminal olefin, comprising:
a. culturing an engineered microbial cell in a culture medium, wherein said engineered microbial cell comprises a recombinantly expressed protein selected from Tables 1-3 (SEQ ID NOs: 4-104, respectively, in order of appearance), and wherein said cell synthesizes at least one terminal olefin.
b. isolating said terminal olefin from said microbial cell or said culture medium.

The application's sequence listing, which the Patent Office published only in electronic form, follows.

SEQUENCE LISTING (104 sequences)

SEQ ID NO: 1 - protein, 2758 aa, Synechococcus elongatus
MASWSHPQFEKEVHHHHHHGAVGQFANFVDLLQYRAKLQARKTVFSFLADGEAESAALTYGELDQKAQAIAAFLQANQAQGQRALLLYPPGLEFIGAFLGCLYAGVVAVPAYPPRPNKSFDRLHSIIQDAQAKFALTTTELKDKIADRLEALEGTDFHCLATDQVELISGKNWQKPNISGTDLAFLQYTSGSTGDPKGVMVSHHNLIHNSGLINQGFQDTEASMGVSWLPPYHDMGLIGGILQPIYVGATQILMPPVAFLQRPFRWLKAINDYRVSTSGAPNFAYDLCASQITPEQIRELDLSCWRLAFSGAEPIRAVTLENFAKTFATAGFQKSAFYPCYGMAETTLIVSGGNGRAQLPQEIIVSKQGIEANQVRPAQGTETTVTLVGSGEVIGDQIVKIVDPQALTECTVGEIGEVWVKGESVAQGYWQKPDLTQQQFQGNVGAETGFLRTGDLGFLQGGELYITGRLKDLLIIRGRNHYPQDIELTVEVAHPALRQGAGAAVSVDVNGEEQLVIVQEVERKYARKLNVAAVAQAIRGAIAAEHQLQPQAICFIKPGSIPKTSSGKIRRHACKAGFLDGSLAVVGEWQPSHQKEGKGIGTQAVTPSTTTSTNFPLPDQHQQQIEAWLKDNIAHRLGITPQQLDETEPFASYGLDSVQAVQVTADLEDWLGRKLDPTLAYDYPTIRTLAQFLVQGNQALEKIPQVPKIQGKEIAVVGLSCRFPQADNPEAFWELLRNGKDGVRPLKTRWATGEWGGFLEDIDQFEPQFFGISPREAEQMDPQQRLLLEVTWEALERANIPAESLRHSQTGVFVGISNSDYAQLQVRENNPINPYMGTGNAHSIAANRLSYFLDLRGVSLSIDTACSSSLVAVHLACQSLINGESELAIAAGVNLILTPDVTQTFTQAGMMSKTGRCQTFDAEADGYVRGEGCGVVLLKPLAQAERDGDNILAVIHGSAVNQDGRSNGLTAPNGRSQQAVIRQALAQAGITAADLAYLEAHGTGTPLGDPIEINSLKAVLQTAQREQPCVVGSVKTNIGHLEAAAGIAGLIKVILSLEHGMIPQHLHFKQLNPRIDLDGLVTIASKDQPWSGGSQKRFAGVSSFGFGGTNAHVIVGDYAQQKSPLAPPATQDRPWHLLTLSAKNAQALNALQKSYGDYLAQHPSVDPRDLCLSANTGRSPLKERRFFVFKQVADLQQTLNQDFLAQPRLSSPAKIAFLFTGQGSQYYGMGQQLYQTSPVFRQVLDECDRLWQTYSPEAPALTDLLYGNHNPDLVHETVYTQPLLFAVEYAIAQLWLSWGVTPDFCMGHSVGEYVAACLAGVFSLADGMKLITARGKLMHALPSNGSMAAVFADKTVIKPYLSEHLTVGAENGSHLVLSGKTPCLEASIHKLQSQGIKTKPLKVSHAFHSPLMAPMLAEFREIAEQITFHPPRIPLISNVTGGQIEAEIAQADYWVKHVSQPVKFVQSIQTLAQAGVNVYLEIGVKPVLLSMGRHCLAEQEAVWLPSLRPHSEPWPEILTSLGKLYEQGLNIDWQTVEAGDRRRKLILPTYPFQRQRYWFNQGSWQTVETESVNPGPDDLNDWLYQVAWTPLDTLPPAPEPSAKLWLILGDRHDHQPIEAQFKNAQRVYLGQSNHFPTNAPWEVSADALDNLFTHVGSQNLAGILYLCPPGEDPEDLDEIQKQTSGFALQLIQTLYQQKIAVPCWFVTHQSQRVLETDAVTGFAQGGLWGLAQAIALEHPELWGGIIDVDDSLPNFAQICQQRQVQQLAVRHQKLYGAQLKKQPSLPQKNLQIQPQQTYLVTGGLGAIGRKIAQWLAAAGAEKVILVSRRAPAADQQTLPTNAVVYPCDLADAAQVAKLFQTYPHIKGIFHAAGTLADGLLQQQTWQKFQTVAAAKMKGTWHLHRHSQKLDLDFFVLFSSVAGVLGSPGQGNYAAANRGMAAIAQYRQAQGLPALAIHWGPWAEGGMANSLSNQNLAWLPPPQGLTILEKVLGAQGEMGVFKPDWQNLAKQFPEFAKTHYFAAVIPSAEAVPPTASIFDKLINLEASQRADYLLDYLRRSVAQILKLEIEQIQSHDSLLDLGMDSLMIMEAIASLKQDLQLMLYPREIYERPRLDVLTAYLAAEFTKAHDSEAATAAAAIPSQSLSVKTKKQWQKPDHKNPNPIAFILSSPRSGSTLLRVMLAGHPGLYSPPELHLLPFETMGDRHQELGLSHLGEGLQRALMDLENLTPEASQAKVNQWVKANTPIADIYAYLQRQAEQRLLIDKSPSYGSDRHILDHSEILFDQAKYIHLVRHPYAVIESFTRLRMDKLLGAEQQNPYALAESIWRTSNRNILDLGRTVGADRYLQVIYEDLVRDPRKVLTNICDFLGVDFDEALLNPYSGDRLTDGLHQQSMGVGDPNFLQHKTIDPALADKWRSITLPAALQLDTIQLAETFAYDLPQEPQLTPQTQSLPSMVERFVTVRGLETCLCEWGDRHQPLVLLLHGILEQGASWQLIAPQLAAQGYWVVAPDLRGHGKSAHAQSYSMLDFLADVDALAKQLGDRPFTLVGHSMGSIIGAMYAGIRQTQVEKLILVETIVPNDIDDAETGNHLTTHLDYLAAPPQHPIFPSLEVAARRLRQATPQLPKDLSAFLTQRSTKSVEKGVQWRWDAFLRTRAGIEFNGISRRRYLALLKDIQAPITLIYGDQSEFNRPADLQAIQAALPQAQRLTVAGGHNLHFENPQAIAQIVYQQLQTPVPKTQGLHHHHHHSAWSHPQFEK

SEQ ID NO: 2 - protein, 216 aa, Synechococcus elongates
FILSSPRSGSTLLRVMLAGHPGLYSPPELHLLPFETMGDRHQELGLSHLGEGLQRALMDLENLTPEASQAKVNQWVKANTPIADIYAYLQRQAEQRLLIDKSPSYGSDRHILDHSEILFDQAKYIHLVRHPYAVIESFTRLRMDKLLGAEQQNPYALAESIWRTSNRNILDLGRTVGADRYLQVIYEDLVRDPRKVLTNICDFLGVDFDEALLNPY

SEQ ID NO: 3 - protein, 270 aa, Synechococcus elongatus
FVTVRGLETCLCEWGDRHQPLVLLLHGILEQGASWQLIAPQLAAQGYWVVAPDLRGHGKSAHAQSYSMLDFLADVDALAKQLGDRPFTLVGHSMGSIIGAMYAGIRQTQVEKLILVETIVPNDIDDAETGNHLTTHLDYLAAPPQHPIFPSLEVAARRLRQATPQLPKDLSAFLTQRSTKSVEKGVQWRWDAFLRTRAGIEFNGISRRRYLALLKDIQAPITLIYGDQSEFNRPADLQAIQAALPQAQRLTVAGGHNLHFENPQAIAQIV

SEQ ID NO: 4 - protein, 2720 aa, Synechococcus sp.
MVGQFANFVDLLQYRAKLQARKTVFSFLADGEAESAALTYGELDQKAQAIAAFLQANQAQGQRALLLYPPGLEFIGAFLGCLYAGVVAVPAYPPRPNKSFDRLHSIIQDAQAKFALTTTELKDKIADRLEALEGTDFHCLATDQVELISGKNWQKPNISGTDLAFLQYTSGSTGDPKGVMVSHHNLIHNSGLINQGFQDTEASMGVSWLPPYHDMGLIGGILQPIYVGATQILMPPVAFLQRPFRWLKAINDYRVSTSGAPNFAYDLCASQITPEQIRELDLSCWRLAFSGAEPIRAVTLENFAKTFATAGFQKSAFYPCYGMAETTLIVSGGNGRAQLPQEIIVSKQGIEANQVRPAQGTETTVTLVGSGEVIGDQIVKIVDPQALTECTVGEIGEVWVKGESVAQGYWQKPDLTQQQFQGNVGAETGFLRTGDLGFLQGGELYITGRLKDLLIIRGRNHYPQDIELTVEVAHPALRQGAGAAVSVDVNGEEQLVIVQEVERKYARKLNVAAVAQAIRGAIAAEHQLQPQAICFIKPGSIPKTSSGKIRRHACKAGFLDGSLAVVGEWQPSHQKEGKGIGTQAVTPSTTTSTNFPLPDQHQQQIEAWLKDNIAHRLGITPQQLDETEPFASYGLDSVQAVQVTADLEDWLGRKLDPTLAYDYPTIRTLAQFLVQGNQALEKIPQVPKIQGKEIAVVGLSCRFPQADNPEAFWELLRNGKDGVRPLKTRWATGEWGGFLEDIDQFEPQFFGISPREAEQMDPQQRLLLEVTWEALERANIPAESLRHSQTGVFVGISNSDYAQLQVRENNPINPYMGTGNAHSIAANRLSYFLDLRGVSLSIDTACSSSLVAVHLACQSLINGESELAIAAGVNLILTPDVTQTFTQAGMMSKTGRCQTFDAEADGYVRGEGCGVVLLKPLAQAERDGDNILAVIHGSAVNQDGRSNGLTAPNGRSQQAVIRQALAQAGITAADLAYLEAHGTGTPLGDPIEINSLKAVLQTAQREQPCVVGSVKTNIGHLEAAAGIAGLIKVILSLEHGMIPQHLHFKQLNPRIDLDGLVTIASKDQPWSGGSQKRFAGVSSFGFGGTNAHVIVGDYAQQKSPLAPPATQDRPWHLLTLSAKNAQALNALQKSYGDYLAQHPSVDPRDLCLSANTGRSPLKERRFFVFKQVADLQQTLNQDFLAQPRLSSPAKIAFLFTGQGSQYYGMGQQLYQTSPVFRQVLDECDRLWQTYSPEAPALTDLLYGNHNPDLVHETVYTQPLLFAVEYAIAQLWLSWGVTPDFCMGHSVGEYVAACLAGVFSLADGMKLITARGKLMHALPSNGSMAAVFADKTVIKPYLSEHLTVGAENGSHLVLSGKTPCLEASIHKLQSQGIKTKPLKVSHAFHSPLMAPMLAEFREIAEQITFHPPRIPLISNVTGGQIEAEIAQADYWVKHVSQPVKFVQSIQTLAQAGVNVYLEIGVKPVLLSMGRHCLAEQEAVWLPSLRPHSEPWPEILTSLGKLYEQGLNIDWQTVEAGDRRRKLILPTYPFQRQRYWFNQGSWQTVETESVNPGPDDLNDWLYQVAWTPLDTLPPAPEPSAKLWLILGDRHDHQPIEAQFKNAQRVYLGQSNHFPTNAPWEVSADALDNLFTHVGSQNLAGILYLCPPGEDPEDLDEIQKQTSGFALQLIQTLYQQKIAVPCWFVTHQSQRVLETDAVTGFAQGGLWGLAQAIALEHPELWGGIIDVDDSLPNFAQICQQRQVQQLAVRHQKLYGAQLKKQPSLPQKNLQIQPQQTYLVTGGLGAIGRKIAQWLAAAGAEKVILVSRRAPAADQQTLPTNAVVYPCDLADAAQVAKLFQTYPHIKGIFHAAGTLADGLLQQQTWQKFQTVAAAKMKGTWHLHRHSQKLDLDFFVLFSSVAGVLGSPGQGNYAAANRGMAAIAQYRQAQGLPALAIHWGPWAEGGMANSLSNQNLAWLPPPQGLTILEKVLGAQGEMGVFKPDWQNLAKQFPEFAKTHYFAAVIPSAEAVPPTASIFDKLINLEASQRADYLLDYLRRSVAQILKLEIEQIQSHDSLLDLGMDSLMIMEAIASLKQDLQLMLYPREIYERPRLDVLTAYLAAEFTKAHDSEAATAAAAIPSQSLSVKTKKQWQKPDHKNPNPIAFILSSPRSGSTLLRVMLAGHPGLYSPPELHLLPFETMGDRHQELGLSHLGEGLQRALMDLENLTPEASQAKVNQWVKANTPIADIYAYLQRQAEQRLLIDKSPSYGSDRHILDHSEILFDQAKYIHLVRHPYAVIESFTRLRMDKLLGAEQQNPYALAESIWRTSNRNILDLGRTVGADRYLQVIYEDLVRDPRKVLTNICDFLGVDFDEALLNPYSGDRLTDGLHQQSMGVGDPNFLQHKTIDPALADKWRSITLPAALQLDTIQLAETFAYDLPQEPQLTPQTQSLPSMVERFVTVRGLETCLCEWGDRHQPLVLLLHGILEQGASWQLIAPQLAAQGYWVVAPDLRGHGKSAHAQSYSMLDFLADVDALAKQLGDRPFTLVGHSMGSIIGAMYAGIRQTQVEKLILVETIVPNDIDDAETGNHLTTHLDYLAAPPQHPIFPSLEVAARRLRQATPQLPKDLSAFLTQRSTKSVEKGVQWRWDAFLRTRAGIEFNGISRRRYLALLKDIQAPITLIYGDQSEFNRPADLQAIQAALPQAQRLTVAGGHNLHFENPQAIAQIVYQQLQTPVPKTQ

SEQ ID NO: 5 - protein, 2762 aa, Cyanothece sp.
MKRNFSNFVDLLNHRAETQSDKILFTFLGDGETESLSLTYQQLDQQARAIAVQLQSLNATGERALLLYQPGLEFISAFFGCLYGGVIPVPAYPPRANRSIERLQAIVSDAEAKFALTSESLVNSIEGKLTQSLSQEAIQCVTTDNLELSLSQGWHKPKINPEQLAFLQYTSGSTGNPKGVMVSHSNLMHNAALINHYFQDTPESRGASWLPPYHDMGLIGGILQPIYVGVYVVLMPPVTFLQRPLRWLEVISRYRITTSGAPNFAYELCATQITPEQRENLDLSCWELAFSGAEPIRAHTLEQFAKAFAPCGFRPEAFYACYGMAETTLIVTGGKRSEKPFLKEFNSKGIEKNQVIPASSCDQDRVSLVSCGQVAEAQKVIIVNPETLNQCADDEIGEIWVSSESVAQGYWNRPQLTEAIFKAYTPDSPERPFLRTGDLGFLQDGELFVTGRLKDLIIIRGRNHYPQDIEMTAEKSHPALRESCGAAFSVEVGEEERLVITYEVKRSYIRKLNVEEVTSAIRKAVTQTHELQPYAIVLLKTGSIPKTSSGKIQRHACKAEFLEGSLNSVGQWSVTQLSEASSQQSKPKPRKNLKQHSPSNSQQQLIQDWLVDKIAQRLSISSAEIEITEPFASYGLDSVQAVRITAELEDWLKVKLSPTLAYDYPSIESLAQYLTALLKGQEIPSTPVLKTVTQQQTKSELIAIIGMGCRFPGANNPDQFWQLLQQGKDQITQVKGRWEKETWGGFLDHIDQFDPQFFGISRREAQEIDPQQRLLLEVSWEALENASIAVDQLAGSQTGVFIGISSSDYSQIRLKSQLDPSAYAGTGNAHSIAANRLSYFYDFRGPSLTVDTACSSSLVAVHLAISSLQRGECQMAIAGGVNLLLSPELTETFTQAGMMATDGRCKTFDEGADGYVRGEGCGVVILKSLENAIADGDPILGVIHGSAINQDGRSNGLTAPNGIAQKQVICQALINGNIQAADISYIETHGTGTPLGDPIEVNALKSVLMEGRSLDQPLWIGSLKTNIGHLEAAAGIAGLIKVILSLKHQQIPPHLHLNSLNPHINLNETPIAIPTQLTPWKIDSKPRLAGVSSFGFGGTNAHVIVGEYNSLSPSPENLSPYPSPTRREELKPVERPLHILTLSAKREKDLSALIDSYKSYLTSQPTASLEDICFTANVGRSPLKHRVAIIANSQDQLREKLGKGEVIKAENSAQLTPKIAFLFTGQGSQYVGMGYQLYQTQPTFKTALDTCADLLSPYLKRPLLEILYPQDSTAISDELDQTAYTQPALFALEYALAQLWLSWGIEPSIVMGHSVGEYVAATLAGVFSLEDGIKLIAHRGKLMQALPQNGQMVAVLSDEVTVKKAINSHHQKVVIAAINGEKSLVISGEHQAVIEVTEVLKNQGIKTKPLTVSHAFHSPLMQPMLTEFERVAQEIEYSLPLIPIVSNVTGNIAGEEMATPHYWVNHVVDTVQFASSMKCLEKQGYKVFLEIGAKPTLLGMGRSTLESDPLNSNSSPYLWLPSLRPEQEDWQQILSSLAQLYVNGIWVDWAGFDQDYPRQRVIGLPTYPFDRQSYWLTQTPQLNSHGLYQVEWEVKQPINDNFSLINPSTWLILADEQGLGELLGQELEKLGQTCLLIYPENGKGQKETFESLLAEVKQTQQTLGGIIHLWSLDEVTLTEAQHRGCESILYLLQTLYEQEISSKVWIATRGTQRVTLQENSLSHLQGTLWGLSKVVALEYSQYWGGIIDLDPEHDPQEAQFFLSEIFNSQKETYLAFRKGQRYVTRLKKATLTPQKLSLYQEGTYLITGGLGAVGLKVAQWLVKEGAKHLVLMGRSQPSANAQEILNTLEEKGVNLSIVQGDVTELEDINRIFNQIKNSHPPLKGIIHAAGLLKDGILQGLSWESFQQVLAPKVQGTWNLHQASLDLSLDFFVMFSSAASLLGSPGQGNYAAANGFLDAFAHYRHSLGLPGLTINWGALSAGMATSTRLGVKGLEMIEIESALEMLSSLLTTSTPQVGVLSVKWDSLSEQFPDLLKTPFFQEVISQDNKPSHEHSEIFTTLLTLSPPQRTEVLITYLQSSIARILHLSPADISPSDSLVDLGMDSLMVMEAINTLKKDLQLMLYPREIYEHPKIEALATYLGTEFEGTHGQSPKSPQHNPQKQELVVSRFSKTYQPLTITKKLPGIIFILSSPRAGSTLLRVMFAGHPDLISPPELHLLPFNTMGQRDQELALSYLGEGLQRAFMELGGLDSQTSQSLIEELIHQNTSIPDVYQRLQELAGNRLLVDKSPTYGMQREILDRGEAMFEGAKYIHLVRHPYSVIDSFSRMRMDKLVGVSGDNPYSIAESVWLESNRNILDFSQTIDKERYYQLRYEDLVTQPSQMMRSLCEFLDIPFNSALLDPYQGDRMTDGVYNQSISVGDPNFSQRRQIDPKLADAWKKIHLPQPLGDTTLRLAASFNYELPHETVLPSPPRRGVGGEVISIPMQENYLTIRGLKLCLCSWGPEDGELILCIHGILEQGAAWEEVATRLAQKGYRVIAPDLRGHGKSDHVGNGGSYNLIDFLGDLDAIATHLTDKPFTLVGHSLGSIIAAMFTSIRPEKVKHLVLVETVLPTEVHEGDTVEQLATHLNYLSSPPKHPVFPDVETAAKRLQTATPAMSEQLAMKLAKRITQAGEGGIQWRWDSLLRTRAGIEFNGINRSRYLSLLKQIQAKITLIYGDQSDFNRPEDLQLQQQTMSQANRIVVNGGHNLHLEAFEELANIING

SEQ ID NO: 6 - protein, 2775 aa, Cyanothece sp.
MKRNFSNFVDLLNHQAEAQSDKTIFTFLGDGESETLSLTYQQLDQQARAIAVQLQSLQAAGERALLLYQPGLEFISAFFGCLYGGVIPVPAYPPRANRSIERLQAIVSDAEAKFALTTQGIVSTIEGKLTQSQISTEAIQCVTTDNLELSLSNQWRRPNLKPDQLAFLQYTSGSTGNPKGVMVSHGNLMHNAALINGYFRDTPSSRGASWLPPYHDMGLIGGILQPIYADVYVVLMPPVTFLQRPLRWLEVISRYRITTSGAPNFAYELCATQITPEQRENLDLSCWELAFSGAEPVRAQTLAQFAEAFAPCGFRKEAFYPCYGMAETTLIVSGGTRGVYPLLKDFDAKGIEKNQVIPSSPLEPNNLTLVSCGKISGGQKVIIVNPDTLKQCDNYQIGEIWVNSESVAKGYWKRPQLTEAIFNAYTADTQEGPFLRTGDLGFLEDGELFVTGRLKDLIIIRGRNHYPQDIEMTAEKSHPALRESCGAAFSVEVGEEERLVITYEVKRSYIRKLNVEEVTSAIRKAVTQTHELQPYAIVLLKTGSIPKTSSGKIQRHACKAEFLEGSLNSVGQWSAAQTLPKTSKQLLEVNSRKKRGHIIKSNPQQEIIENWLVTNIAQRLGLSPTEIEITEPFASYGLDSVQAVRITAELEDWLKVKLSPTLAYDHPTVESLAKYLASGTVETTLATSKPLKTSSSVAIIGMSCRLPGANSPDEFWQLLRQGKDQITQVNARWDRDDWGGYLKGVDLFDAQFFGISPREAQEMDPQQRLLLEVSWEALEKAALAANQLAGSNTGVFIGISSHDYSQIRLKNALEPSAYAGTGNAASIAANRLSYLYDFRGPSLTVDTACSSSLVAIHLAIKSLQSGECQMALAGGVNILLSPELSETFTQAGMMAPDGRCKTFDESADGYVRGEGCGVIVLKSLEDAIRDGDPILGVIHGSAINQDGRSNGLTAPNGIAQQGVIRQALMNAGMSAADISYVETHGTGTALGDPIEVNSLKSVLMEGRSEKHPLWLGSVKTNIGHLEAAAGIAGLIKVLLCLQHQEIPPHLHLYRLNSHINLDDSPISIPTQLTPWKPENRPRLAGVSSFGFGGTNAHIIVGEYQNLSPTKRGQVEELERPLHILTLAAKREKDLSSLVKSYQHYLTAFPSASLEDICFTANNGRTQFKNRLAIIAQSREQLAEKLSRGEFITPQIAQKLNPKIAFLFTGQGSQYIGMGYQLYQTQPTFRAALNTCADLLEPYLEYPLLEVLYPQENSNLAHYLDQTAYTQPALFALEYALAQLWLSWGIEPSVVMGHSVGEYVAATLAGVFSLEDGLKLIAHRGKLMQSLPQNGQMVAVLSDEETVKKAINSHDEKVVIAAINGERNLVISGENQAIIEVTDRLTHQGIKTKPLQVSHAFHSPLMQPMLEEFASIAREVEYSLPQIPLVSNVSGNLAAEAIATPEYWVNHVINPVHFSPSIKLMESKGYQIFLEIGAKPTLLGMGRSIIESDSSVNHQNAYLWLPSLRPGQSDWQQMLTSLAQLYVQGINIDWAGFEADYQRQRMGGLPTYPFERQRYWLKPELEIHTGTKRLTTEQVSPPNQDWLYQVVWEAKPINPHQLSNQKTSTWLIFGDQQGLAKTVAEQLEKLGKTSLLVQSDKGDKNGNHKTLNPTEKNDFQRLLTPFKTSGESLEGIIYLWSLEEDEISKSNPQSILYLLQTLYEQNLSSRLWIATRGIQPVTTEDLAAPHIPLQGMLWGLGKVIALEYSDYWGGLIDIGTQPHTDEAKLLLSAIINPDGEQYLAFRDGQRYVARIDKAEIKPKKFSIDENGSYLITGGLGAVGLKVAQWLAKAGAKHLILMGRSHPTANAQETIKHLEKQGIEIIIAQADVTRQEDIDRVFNQIKTPLKGIIHAAGLLDDGILQGLSWEKFKKVLAPKVEGTWNLHKASLNHPLDFFVMFSSAASLFGSPGQGNYAAANGFLDGMAYYRQSQGLPALTVNWGALSGGMAKATRLAVKGLDLIDIEPALDILSHLLADKIAQIGVVSVDWETLAQQFPQLRQSPYFQRVITQLSPEQVKPDHSQSQILANLLALSPEQRTEALTAYLQSAMAQIMQLSPSQISGEDSLLDIGMDSLMIMEAINQLKRDLQLMLYPREIYQHPKIEALANYLAAEFERTHGKGQIPVTSKQELVVSRLTIANQPLTITKKLPGILFILSSPRAGSTLLRVMLAGHPDLASPPELHLLPFNSMGQRNQELALSYLGEGLQRAFMDLQGLDSATSQQLIERLIAEDISIPDVYEMLQQSAGKRLLVDKSPTYGMQREILDRAEAIFEGAKYIHLVRHPYPVIDSFCRMRMDKLVGSEGDNPYQLAESIWWESNRNIIEFSKTISSDRYYQLRYEDLVTQPSQAMQALCEFLDIPFDSALLDPYQGQRMTDGVYNQSMSVGDPNFSKRKQIDPKLADAWKDIQLPHPLGDNTRQLAISLNYPLPHQNIPPLLRGEGGITEEVHLEEEYINIRGLNLCLCSWGPKQGELILCVHGILEQGAAWGQMATRLAGLGYRVVAPDLRGQGKSDHVGKGGSYNLIDFLADLDAIANSLTDQPFTLVGHSLGSIIAAMFTSIRPEKVKNLVLVETVLPTEVSQTDAVEQLATHLNYLASPPEHPVFPDVETAAKRLQTATPAMSEALAISLAKRITEPCEGGIRWRWDSLLRTRAGIEFNGINRSRYISLLEQIQAPITLIYGDNSDFNRPEDLQAQQKAMSAAKRIILKGGHNLHLDAYEQLANIIKQILGKTGQSF

SEQ ID NO: 7 - protein, 2211 aa, Lyngbya majuscula
MSNVSKTTQQDVSSQEVLQVLQEMRSRLEAVNKAKTEPIAIVGMACRFPGGANDPSTYWRLLHDGIDAITPVPPHRWDVNAHYEPNPEIPGKAYTKQGGFIEQVDQFDPLFFGISPREAISLDPQYRLLLEVTWEALENAGQTWTNLKNSKTSVFMGVSTDDYASLSNPILINNRSLGVGRISHLLGLQGSNIQLDTACSSSLVAIHLACQSLRSGESNLALVGGVNLILSPISTIGRCTMKALSPDGRCKTFDAAANGYGQAEGCGVVVLKRLSDAITDGDLISALIRGSAINHDGPSSGLTVPNGMAQKQVIQQALSNARLEPHQVSYLEAHGTGTALGDPIEIEALAAIYGKNRPVDQPLVVGSVKTNIGHLEAAAGVSALIKVVLALQHQEIPPHLHLKQPNPYVDWDKLPIKIPTSLMPWNCEAKPRIAGISSFGISGTNAHLLLEEVPELIKGQKAKGKSENDLERPLHILTLSTKTEKALEELVSRYQNHWETYPELAISDVCYTANTGRAQFNHRLAVIASGSEELTQKLRQHTAGEEVVGVFSGKVPNSGSESKVAFLFTGQGSQYLNMGRQLYETQPTFRQALDTCDHILRPYLDNPLLEILYPQDAQKSNDSPLDQTGYTQPALFSIEYALLKLWESWGIKPNVVMGHSVGEYVAATVAGVFSLEDGLKLIAARGRLMQGLPAGGEMVSVMASESKVLETLKAMSLEDKVAIAAINGPESIVISGEAEAIRAMATHLESVGIKTKQLQVSHAFHSPLMEPMLAEFEAVANQITYHQPRIPIISNVTGTKADKSIATAQYWVNHVRQPVRFAQGMATLHQQGYETFLEIGAKPILLGMGKQCLSPDVGVWLPSLRHGVDEWQQILSSLGQLYVQGAKVDWSGFDRDYSREKVVLPTYPFQRERYWVETSINQQQVVCSGEPNLQGTPEGTSTTIVKLLSQGNTKELAEKVEKTSDLPPEQLKLLPDLLASLSQQHQQELARLTTKKWFYKVQWISQAIKPQRNKSNNQVCHWLILTDSKGLGKSLATHLQQLGNECSVVYQADNYQNYEPGIYHINPSHPQEFEQVYQTIFENGKLPLQKVIHLWSLDTASEQDLTTETLEQAQLWGCGSTLHLLQTLVKNPNSTPPKLWMITRGTQPVLSPTEKLTVATSPLWGLGRTIASEHPQLWGGLVDLDPQGSEDEVEVLLQQIIDSQKEDHLAVRNRKIYVARLLKHIPQESQPLSLRSDATYLITGGLGALGLKTAAWMAEKGARNLVLISRRQPSEQAQQTIQSLEELGTQVKVLSADISVESDVANILEQIQTSLPPLLGVIHAAGVLDDGLLQQTNWERFTKVMAPKVNGTWNLHKLTQHLSLDFFVCFSSMSSLLGSPGQGNYAAANAFMDAVVHYRREMGLPGLSINWGGWSEGGMATRLASQHQNRMQTAGISLISPEQGIQVLEELVRTQSTAQVGVLPVDWSVLAKQFSSANPSSLLLELLQQETSSEKTDERILEKLQAAPITERQDILKNYIQLVVAKTLGINPSKISTDDNFVELGMDSLMGMEVVNKLSGDLDFIIYPREFYERPTIDSLTQYLSAELSEDNLATQPSPTSLEIFATKSSPSGNSARPASVSSRLPGIIFILSSPRSGSTLLRVMLAGHSSLFSPPELHLLPFNTMKERQEQLNLSYLGEGLQKTFMEVKNLDATASQALIKDLESQNLSIQQVYGMLQENIAPRLLVDKSPTYAMEPTILERGEALFANSKYIYLVRHPYSVIESFVRMRMQKLVGLGEENPYRVAEQVWAKSNQNILNFLSQLEPERQHQIRYEDLVKKPQQVLSQLCDFLNVPFEPELLQPYQGDRMTGGVHQKSLSISDPNFLKHNTIDESLADKWKTIQLPYPLKSETQRIASQLSYELPNLVTTPTNQQPQVSTTPSTEQPIMEEKFLEFGGNQICLCSWGSPEHPVVLCIHGILEQGLAWQEVALPLAAQGYRVVAPDLFGHGRSSHLEMVTSYSSLTFLAQIDRVIQELPDQPLLLVGHSMGAMLATAIASVRPKKIKELILVELPLPAEESKKESAVNQLTTCLDYLSSTPQHPIFPDVATAASRLRQAIPSLSEEFSYILAQRITQPNQGGVRWSWDAIIRTRSILGLNNLPGGRSQYLEMLKSIQVPTTLVYGDSSKLNRPEDLQQQKMTMTQAKRVFLSGGHNLHIDAAAALASLILTS

SEQ ID NO: 8 - protein, 2147 aa, Lyngbya majuscula
MSNVSKTTQQDVSSQEVLQVLQEMRSRLEAVNKAKTEPIAIVGMACRFPGGANDPSTYWRLLHDGIDAITPVPPHRWDVNAHYEPNPEIPGKAYTKQGGFIEQVDQFDPLFFGISPREAISLDPQYRLLLEVTWEALENAGQTWTNLKNSKTSVFMGVSTDDYASLSNPILINNRSLGVGRISHLLGLQGSNIQLDTACSSSLVAIHLACQSLRSGESNLALVGGVNLILSPISTIGRCTMKALSPDGRCKTFDAAANGYGQAEGCGVVVLKRLSDAITDGDLISALIRGSAINHDGPSSGLTVPNGMAQKQVIQQALSNARLEPHQVSYLEAHGTGTALGDPIEIEALAAIYGKNRPVDQPLVVGSVKTNIGHLEAAAGVSALIKVVLALQHQEIPPHLHLKQPNPYVDWDKLPIKIPTSLMPWNCEAKPRIAGISSFGISGTNAHLLLEEVPELIKGQKAKGKSENDLERPLHILTLSTKTEKALEELVSRYQNHWETYPELAISDVCYTANTGRAQFNHRLAVIASGSEELTQKLRQHTAGEEVVGVFSGKVPNSGSESKVAFLFTGQGSQYLNMGRQLYETQPTFRQALDTCDHILRPYLDNPLLEILYPQDAQKSNDSPLDQTGYTQPALFSIEYALLKLWESWGIKPNVVMGHSVGEYVAATVAGVFSLEDGLKLIAARGRLMQGLPAGGEMVSVMASESKVLETLKAMSLEDKVAIAAINGPESIVISGEAEAIRAMATHLESVGIKTKQLQVSHAFHSPLMEPMLAEFEAVANQITYHQPRIPIISNVTGTKADKSIATAQYWVNHVRQPVRFAQGMATLHQQGYETFLEIGAKPILLGMGKQCLSPDVGVWLPSLRHGVDEWQQILSSLGQLYVQGAKVDWSGFDRDYSREKVVLPTYPFQRERYWVETSINQQQVVCSGEPNLQGTPEGTSTTIVKLLSQGNTKELAEKVEKTSDLPPEQLKLLPDLLASLSQQHQQELARLTTKKWFYKVQWISQAIKPQRNKSNNQVCHWLILTDSKGLGKSLATHLQQLGNECSVVYQADNYQNYEPGIYHINPSHPQEFEQVYQTIFENGKLPLQKVIHLWSLDTASEQDLTTETLEQAQLWGCGSTLHLLQTLVKNPNSTPPKLWMITRGTQPVLSPTEKLTVATSPLWGLGRTIASEHPQLWGGLVDLDPQGSEDEVEVLLQQIIDSQKEDHLAVRNRKIYVARLLKHIPQESQPLSLRSDATYLITGGLGALGLKTAAWMAEKGARNLVLISRRQPSEQAQQTIQSLEELGTQVKVLSADISVESDVANILEQIQTSLPPLLGVIHAAGVLDDGLLQQTNWERFTKVMAPKVNGTWNLHKLTQHLSLDFFVCFSSMSSLLGSPGQGNYAAANAFMDAVVHYRREMGLPGLSINWGGWSEGGMATRLASQHQNRMQTAGISLISPEQGIQVLEELVRTQSTAQVGVLPVDWSVLAKQFSSANPSSLLLELLQQETSSEKTDERILEKLQAAPITERQDILKNYIQLVVAKTLGINPSKISTDDNFVELGMDSLMGMEVVNKLSGDLDFIIYPREFYERPTIDSLTQYLSAELSEDNLATQPSPTSLEIFATKSSPSGNSARPASVSSRLPGIIFILSSPRSGSTLLRVMLAGHSSLFSPPELHLLPFNTMKERQEQLNLSYLGEGLQKTFMEVKNLDATASQALIKDLESQNLSIQQVYGMLQENIAPRLLVDKSPTYAMEPTILERGEALFANSKYIYLVRHPYSVIESFVRMRMQKLVGLGEENPYRVAEQVWAKSNQNILNFLSQLEPERQHQIRYEDLVKKPQQVLSQLCDFLNVPFEPELLQPYQGDRMTGGVHQKSLSISDPNFLKHNTIDESLADKWKTIQLPYPLKSETQRIASQLSYELPNLVTTPTNQQPQVSTTPSTEQPIMEEKFLEFGGNQICLCSWGSPEHPVVLCIHGILEQGLAWQEVALPLAAQGYRVVAPDLFGHGRSSHLEMVTSYSSLTFLAQIDRVIQELPDQPLLLVGHSMGAMLATAIIGNGPLTLDRLRTEAARIRPFRQRRRLPTYRSRRRAWCAPCRVRKFNVAKTSNVAPCHICSWNGRSGCRGGRCAGCGPGPVAAAASTADLVGISIRQKDGRGRGGDNRLC

SEQ ID NO: 9 - protein, 1217 aa, Pseudomonas entomophila
MSTMDSVLSSVESFSRPQLLETVRRIQRRLATSSSGADAVTLGDCHEIVWETQAVDSYLQGCSVPRNGALLCWSTWAEFSSALAVDAQPTYQVSSVDEALALLEEGQAPAFTALVVDLFSLVHSKVDPGAVLMDRLKAVVAILAELKHVLSAADRNGVDIVLRTADALGPVSLSDPRPPLAAVFHGWVLGAAIECPRLRITTVDMDVSDLHVLLALSGGAERQLVYRNGAVHFRMLRPVAEQFLDSGHGQSWGNCLIVGGAGEVGKHLSAELTRQGATRIWHVGRRPSAQVEEGITYLSVDVREPEQVLSLKLHLEQQGARIESVFHLAGTVKQSSIFDASEEDDWLVLAPKVLGGATLLEIFDDVATNHYALSSITSLVGTHGAASYCAANAFLDHLADRCNGRMHTINSGPLLGVGMASMSGFSASSGWEGLGVHPLEVEALADCLGALASRSIRHWLHARVDWAQLQARLDGKLSQALVGQLLKAPMQRPEVRGLAVSERLLALESDEAREHALQDYLLGLFRAAATVATESLDVSASIEAWGLDSLVLMEILKTVRMDLGLIIYPREMYTHSTLSQFAHYLAGQLRAGNDEPLAGGDSRQRHEDYLSPLADLAGVVQDVADRVPGVAFILSSPRSGSTLLRAMLQGHDQVFAPPELHLLGYTSLAQWHEATKENYFDQGLQRALMELHEGSLDEAVSLLGQWVDQDIAVAEVYRFMRERSGCGLLVDKSPSYASNPKALLQAELAFDKPRYIHLVRNPLAMIESFSRMRMHKLLGQQDNDGISTAERIWLEGNLNLEAFFARHVEAERVLRVDYETLVRDPETTLRGICAFLDIEFQPSMTMPYGVGRMNDGVREGSLAIEDPNFLKRDRVDASLADAWRHRSLDRPLWPQTVALAGRLGYDEALPASAKRDEAARQTLNVQAGEVSLSVSAWGRYEHPDYLCLHGLLDQATVWDDIAQNLYASGRSCIAPDIRGHGLSGHGSPQRLPALLDYVMDTDAVHRASGTQPLELVAHSFGAVIAVAYAAAFPERVKKLWLIEPVLLAEKRHDPRLFYREMVQFLAAPHEHLPLGSLQQAAERIRAVSSFLTQDRACELAERMTTVGDDGERRWTWDPRLRFRAGLGLGLDRDTYLQILHALEVDVHIVFGRDSRSNRRKDIELQAQGLDDDCVTFIDGGHNLHLQHPDEVTRIITRNPGISPIQEVRDDEHSETTA

SEQ ID NO: 10 - protein, 3045 aa, Haliangium ochraceum
MPHAERLRRAVLLIKKMEAQLAAERASRRAPIAIIGSACRLPGGVADRDALWKVLRDGTETAEAVPAARWQMAANTHAGARWGAFIDDVDCFDPSLFGVSPREAAQADPQQRLALELVWAALEDAGMAPDGLHGTRAGVWLGMSGGDYSSMLSWSRPTGLDLHGMTGAIAAFLPGRLSYALGLQGPSMTVDTACSSSLVAVHLACNSLRAGETSLALVGGINLMLWGMHNDGLAGSGALSPDGKCYTFDSRANGYVRGEGGGVFVLKRLEDAQRDDDRILATILGSAVNHNGRSTGLTTPNGLAQQDLLRDALADAGLSAGDLDVLEVHGTGTPLGDSIEVDAIRAALGTGGERPLWMGSVKANLGHLEAAAGVPSLLKLILALRHEQLPPQATFRSLNPLIDLADSRLRIAERAVPWPSGERPRRAGMSGFGMSGTNAHLIIGEAPARAEPAAGPERPVHVLPLATTDQPAMARRIAQMSAWIHSHPEARAGDVAAAAARRMARLPVRAAVVAADLPGLEAGLERLAAGTSGPGAVRGAAIEMRPRIGWLFTGQGAQRADMGRGLYEHHPGFRETLDRCADALGRAHDLREVMWSSDGRLDRTGWTQPALFALEVSLAALWRQWGIEPEVLVGHSVGEIAAACVAGVFSIEDGMRLVEARARLMDALPEGGAMVAVRGQPARIERAVASAEGVSVAAFNGPDQVVISGASDAVQALASELAEAGLRAKALTVSHAFHSELMEPMLEDFRAALRDIRFHPPELPLVSNLRGELAGPEVASADYWVEHVRAPVRFLEGMRAAHAVGVDHYLEIGPQPVLCRLGATCVPAGGGETWLPSLQRTRDDWEVIANTVAQLHSLGADIDFAAFDEPFARRWVDLPCYPFERRRFPLPAIAEPDVSELSELSDLGDAAFVRGTERMASPRQPVRAERSSGLVHVVHWTAVADLPESQPAGQWVVLHEGAPLAGELASALGAVTVELGHSIPACDGLIILLGRDGEPADEAARQTRAALDILAALRDRRPAPRTVWITRGASAPGREPSGLAGAALAGMLRCLALEQPELSPRWIDLAGAGDEGELVACLIRELGASEPEVRLWGTRRQLPRLDALSRLPGVLEAPAGPHLRLVRGQGNSLDALSIAAWQPGPLAPDEVRVRVRAAALNFRDVLSVLGMYPDDIGEPGGEVVGEVEALGSEVVGLSVGDRVMGGGQGGLADRVDIPAMQLVQVPDTLSDVEAATLPIAGGTALFALAELARVQPGQRVLIHAGAGGVGMAAIHIARMLGAEVLATASPGKHALLRELGVELIANSRSPDFGERLRAASGGRGVHVVLNSLTGRFIDEGLSLLEPGGVFVELGKRDVRDPAAIAAGWPGVRYEVLDLTALPIEEFHANSQRVADIAARGDLPALRRSLYSLQRAPEALRRLGAGETVGKVVVRPPSANPVFPTACPVLITGGRGALGRAVARWLVQHGVRHLVLAGRSEPGQDDLEFAAALGEQVEQVVLDVCDEHALAELLARLGPLGGVVHAAGVLDDAMLHNTDAERAARVMAPKVQGAWNLHRQTLNRPPDLFVVFSSVAGVFGNPGQSAYAAGNAFLDALMAWRAEMGLPGTSVAWGAWEGEGMAAGIDRTRIEAAGLRMLQPEAALQALAEALASGLPRTVATPLPTGRMGKGAPALLAHLGEVRGPAAATGAAAAASSQVANLGPDALREQLARRVANLLGHSGLVSIRRPLHELGLDSLMAVELRNGLAAWTGLELPATLAFDYPSVDAIASLIEGSLEPVQAAEEAPTRTDEPIAIVGLGCRFPGADNPQALWQIVLKQQVMVRPVPAERWPADAWPAPEEPGGLPRAAAFLDRVDQLDAGFFDLSAGEARDMDPQQRLLLEVGWEALEDAGIPPLSLEGSNTGTYVGICCSDFRELCGDSALGVHGGTGTLHSVASGRLAYVLGLNGPAITVDTACSSSLLAVHLACQALRSGEVDLALAGGANVILSPRSSVEINRLSALSPQGRSLSFSADANGYGRGEGCGVVVLKRLSDAVRAGDRIVSLILGDASNHDGRSNGLTAPHSGAQKKVIQQALRRAGVAGREVELIEAHGTGTPLGDPIEVQALDAVLREGRERPVVLGSLKAGLGHAEAAAGIAGLLKVALAIQAGVLPAQPPVGALNPHVAWDRLKVDVIEQPQPWPSERRIAGVSSFGLSGTNVHVVLGAPPPVETSPTPLQGVLHLPLSARSAPALRELARAWAERLEQSSLADLLHTARVGRSHLEHRVCVCGHDAEQLAAALRLFAESGTLEPDELARRFMAGEQVEWPLIPGARIVSAPTMRWQRRRYWPRGLDSASLVPGGASARGETAPDGVNVTDVADIADVGAWLSEHLVELLNLEPEAVTRDAELAALGLDSMLSLELGEAIRDELELTVYPRELAEIRTLAELETLLGRLADERVSLQARPAAAPHDAEPELGAPLEPELESPLGPEGERLRGAPLREGPVFVLSAPRSGSTLLRVMLAGHSRLFAPPELHLLVAADLAAWRDSPRHLDEGLLEALVQLGQGTPEDVRALIDQWVAEGLSIADTYRRLMDLCAPLALVDKSPSSVMDRDALMRVAREFPDARFVWLVRHPLAVVESMIRRRIHAVVGAVEDPQTFAEQTWCQSVDNALALRDEVGAERFVTLRYEALVRDPAAAMAHLCDALGLAYEDALLRPYEGERMTDGLHDGSLSIGDPGFKERRDIEPTLADAWREVRLPRPPSAALCERAQRLGYPVASQRELVSDLVLSTWGPESGDAVVCIHGHLDQGPLWTPVADRLAAQGLRVLAPDLRGHGRSPHGSLGLFEHLADLDALLAAQAPGRIVLVGHSLGALIAAFYAAARPERVAKLVLLDPGLPSPLSEGPGAALARALDRRRDAAHAPMAGLDEAARRLRRAIPDLSEAWSRELAERVSEQRGEHRVWRWDPRLRVLSGEGFDRDTALEILASQHAPVTVAFAARGDRARPEDRRAIEDALGSATFVELDTASHHLHLARTEDVVGLIVERAAAQSTMSSPDRSTNAP

SEQ ID NO: 11 - protein, 14149 aa, Micromonas sp.
MQMTFASSIDFRGQGSSFFDSLRRLPPNPDEDTSVQKYFRSSVLDARTVIALDQEQDNVETNDLKTNTRIHHCASSQDSSAFIFADGGHIMYKSGWLTQDLDRFCVRSCDRALNASAEDFKRSIEVRNLPASMSSSPFALSEYISDVNDDACYVNCADGAAKKIDNHDDVSYAYVWSSPVSIPHIFVRQMIDFNPFFSGNFFCKQIVNPDAQGYSKCMLQCGVKLQVTTTQIQFGLGNLKGMTEWTRGVSMVSVSSSSWLALYWRLHKLNSCLPHGDRLGIVLQNKNQSFVVCGSRVGIYRLIGPRSVSSKSTGMRGFPSSIPLHSSPFLGNAIFNIFYKVVDHVKRCYASSHRQAFAALSKPIPDNDCGGFITAVTLYLICNAVSWPESASLTRIMIDMFQRYVSSTEILDCRWPVRVARHGSSKAISTSQSETCAVFKNTKAMQYATILLKRISILACEQRLFWTQNIVFPSSCAYNKGFITRLSTNDVDEIRLLNAAINMFNLHPSLYERKNRSDYPHLHMQNYEAPNVPKIQIFSLEEYGLATASPEEINAEHPAVIAACSEAIDTSTGAFFRVYLAGKHAVLVLVHHIVCETMSLANLAERFSEAYLSPDVSWTIREQSTSFECSSFTQDKLDFIFDASAQAYYSFALLSHKLDTWHRMLTNEDRTFTLFSLKNDYICRSTGIANGCGTIPQRKRPCCNIKLNISTEFAIALRKCSNMRERNVFATLASSWSLVVRRQSGYDCNNNLVDSLTFGSSVDLRNLSGLNEFHSIGCFSAMLPTRCEFASVHNGLFDGLAFRIHIFCQAVFELMDVPLMGIIDRIDLGSKRCKTEGNPLFTTCFSFVSHSQLQKASGIDGVISDKKASLARFYEAAFDIWLGIGEMGTASMMGNLMYDATIFSRRSAASLLMSLKASLKQVACKPNISLSAADEWIIKSNIDMHALNSGTVSNFDTNYAVRTLCDMKLGYKDSIRLWRPSQFLESGLLSSSTSTVSDIGGNVTLSFKTVHFQASILASKLKSAYEGTRQPRMSLFSGNSWCSLIVHYAASLVGGIIGNHNVHLAGSEFAYQLKLFDPELVVVGAGDRLKTVFDDAIGTNQVELNNLYPEFLRLPWSIEASHAMLSIETGNFPVQTTDVTVHPINKPYMLYFTSGTSGKPKGVVLDQNAISSHAVGTVCEMRLNSHDIWLHVAPIFHLVDAFSVYAITAVGGHHVMQAVFEAAATLRVIEREGITVLNLASTMVALMTSQATAEIVHLDLSSIRVLSCGGSPITNSTVLQAVGLLCSEFFVSYGMTECCGKISVSLLESDMRENPNYRTKDHINAICTSGRPFRVQMVRIVEPNGKLIVPGNHRIGELQCKGITLFSKYVESCRASDMFDSGWFTTGDIAMVDSNGYIIIVDRKADMVIVGGENVYTNEVENALLTHCAVNQAAVFGMDAELLGQVIYACVVLKPQCIGNVKEEDLKDHVKETLSSYKVPSKISLLKSLPHGGSGKVLKSELRKLALLGRSGGQRCSAEIDFCNDKANACSLEDAKVASHSQNLRKCLIILESNMDILVLPKVAQLVTKIHGFETLVIWLAPMLEANISGQDFYRLFLPSLNNVNVTVHVMVIDMRDICQITASCCSIWQLSTKATKSVELVMKIDHGCRHTTCSEGVFYPEALNHYFSRLLLYVVCGLAANLVDINLANYGIQQFRCHANPSRLMFHDMAEVQRRTCVVLESVFGKKEHQEISLQTRLWDFGLTSILALSLSASLEDEFNHNFPAGVVFNHESVSQLAKFIYDEISVAVPSKEHFDLSRQVPTMICSSETFVVSASQVESLYSNQPIKSSADVQTSLGSNLCLDNLCDDDIAFDAVTMIILSAIHKVFLVADGAYDHRPNTKEVIHKNRAILKSAFEGTIKDIINIDEAFWLIGLTSKAASQISDDLSIGFHKDIPAVAVFDYPSINDLSAYIKRRIGSDHEYSEDKNKLDISSKLEPYGIKGSVLSSLLEHCGRQGVVVNASHLTTGMAESLDYNFICHHSNADCITSIPRSRWDPDPNHSRRLHRHFGNLLTTIDDFDSDYFRCQRAEAELMDPQQRLLLHRCTLPAIDIRSNDTKCGVFVAISHIDYAIELYSLRRPLSPYMATGSANSVACGRVSYTFGLTGPCASVDTACSSALVGCHFLNGCILHENLDYGIAAAMNLCMSQERYMIFYVAGMLSKEGRCKTLDAAADGYVRMESCCAVALVRSQHREHCKQAFCASVSLPSSVLNQDGFSSSLTAPNGPSQQALICRAMHISKADPKQITTMQMHGTGTPLGDPIEVGAICDAFTMIDRDIFGFALHSIKSILGHAETSAGALGLLQATQSLINARSFPLTHLRSLNTHVSLSLQRFYKITKGGDIISPSQDSQLATLCRLGCKTTELHFPSHQMTGVSSFAFQGTNAHLVVASTSSEQTVKNHLKEKSACLWRNEKVLIKPHLHAFIQCAVQHLGNKSEYEFCIGFSSPCSSWLMDHRVGQYAIFPCTASLETADAAVNFGRCNRFSSCSTYCSFSLATLANMTLPFPIVLGKSTEENSIIFVHLDNNSGEIIMQDRKPMIFFKACASEAILEYRRASKKVQAINSIRCRGLHMFDLTSLKNHNNFSQTSVKPSTFDGQVEAHKTDQIESQMKIIHRRAGFGQIVIRRDYAADGTWTHPAGTDCSLQVAFCISSKKIEKTIIPVSAQGYTVPEQYNRQGGVMLSSVFIDISSKATHVLDGPRAYRSGANVIINSLASRNVLSFTARQATCTIKKPSILAESTDSDIMYIMSWHAVPARTTPLQRSFRQNCNTLGTYNHRNVSLKRINANGLASIAILQSLNSQLTEANLNTHARCYRVSPEISFVALHASVRMAWCVAHVELPTKTRLVSLRWSPNYQLARSLLPEEISCPEHLTRPARIDNADERTLSAHGIANDANVQFTPAVRLCMTISGLKPKHVIETSFLIRSIFKKQQSVNKVVEHAPPGKRKQQSVLLTGGLGGLGYLLTSYMIHVARSRNVLVGSTSGRASKLNPASTFSHALYNIIRSNIGLTDETRCALVGEGSFLASQLTTIIHAGGRLNDATISNQTVGKFCSVSSPKFIGLQRMAEAMMNSYALDNFLLFSSIASLIGSSGQINYAMANSAMDEFAELMQNVGTPILSIQWGAWGEDFDGMTSGDRRVLTKMRHHGFGVLKPEEGVLALDHFSTPSVAEPSSAIRIITPLDHQKLCEPKSLASKLSIFDQFSQNMACVPGDRTITPFKYTDVECKVANLVTEYIGIQVSSNDILANKGLDSLGAIELCNSLAQTFAVTLPSTLLFDHPSIECVTRHIRGLLDLSDRTSVEPDSVSPGVRGYSDENDHRSCQLQDLMKSCAQKILQTPIDVSRSLISAGLTSSTAFKLSQEISSKIGFQVPSIAFFKYSTIHELSGYLRGHDLLVQKFQSADPFLLEQKRLIIASKSNYCMSVNERLDNVGCSPFSRWQVGDNDLFSCVPRFGVHMLEIGTFDMSVFEITFAELSRMDTQHGCLLTTSYNALTALEAHHDLQLRKGYEVGVYVGISSTDHHVLCRKNHLTSSLSSSSFDATGGAHSVAAGRISFTHGFTGAAMAIDTACSSSLVALNTASAMCHRFCFSNNVACVASVNLLQALYTTMVFERAGMLASDGRCKTLDSVADGYTRAESCIAIYLTDAIEHVVTAAMSAGTILSSAVNQDGRSSSLSAPSGVAQQKVICNAINLAGLERDITGILLHGTGTALGDPIEIGAIILVLKSMQERERDFSDLFLVALKSSLGHSESASGMSSVIHAISSIAQSNVCPTVHLRILNEHINAHYGTHHLLNRVKTSFGPRLFRIPASLVANIKQDVTKAPRCCSHRKVLSMSGFAFQGTNAHALVSTLQNNSCPHSKTVAGLDKSPNLLNTWHMSSRCKEEPHPFISSLELTAGASFSIQLYSRLGFPFWHAFIFDHAVHGRVIFPAAGFLELSAAATTFSAKGIYSGIEHVTIPTPLILRSKKWDTPAVINVLFSKVLIGFGNIEIRTKKCIHVNAACTLNARVKSVAATSRTSLNFFEKTSMNETGSYALKTDTVTCQARVQLSGVSNRESSEYSSFWMNPSVLDAGLQLASTCSRAGGNIARLKIPASMAYYASPFLMTGILKRSYFASSYIQENTCSLESNVEVASFAATKSCSLKRVSHKLINSTSAAFYDSSNESLHSQAAINLPVYKVTEMATCVADKSVPAQIIQYYHNNEPNNNNNNTSRKVGYIVRHACSCLENIQNYSGDIHEIKVMGQKEFIGHAVIHGVLQCAERECDSSICSTRCLHVCGLKYRVGLTKFVHSSDNSRCASLPSTRSSESQTGINLEHCLFRILRAHIHLLNGRRDFSTGREELKVRRVIITGGLGMVGQHAARHLIVHAGTFEILASGLSGRVPIIERKILDESAHKCFIQCIRCDVSNSEEMRYIVMAQHRSSWLLHASGVIQDSLIAKQTCNFMTSAMAPKAVGIHKWALNAFASPIGAVLLCSSIASFFGSSGQANYCSANKELDAWARIAKSSGLFTMSIQWGAWSSTKGMSSKSPLVLNRVKRLGFGILSPNVAFKTLSKFVMASHGDVSDIIVISPLDIVLLKAWMLEDVFHDEFSAPKQCNSNSKISSSPLTVPEKKKAGTEVSHIKVEELQNQICDLVEAALGYRIDIQISLIEAGVDSLGAVELRNSILNLCENQDFRIDSLPAAFVYDFPTISAISQFLIKKATNNGENKQLNDTRTNQKNAHSSCVGLDNIFNDNSAHESREFVCSLSTALVPGDRRRMYEVNDKILCLPRSRLCSNFAAQQRIRFGGILPAISEFDASLYRINDSEAFYIDPQHRKLLDLALSIFLNSSASKHFRTALQAVTPCKPETSVAVGISGTEYLQQVRSYMGPAAYTALGTFLSVACGRISYSFGLTGPSFCVDTACSSAIVALHLIVIERANDNGNTVTSILHSQAMVAGSNVTLHTSTTDLFSAAGMLALDGRCKALDVAADGYVRSEACLASFVQRNDRKERSTSPLIVGTAINQDGRSATLAAPSGQAQQMLLKNAICIANISGNEMNVVKLHGTGTSLGDPIELSAVIAVYHATACRSIPIIASTPKSCVGHTEPASGALGVAFALNLLWTLSGMPSLHLRTINTFLGRTMMSDSIGSFRQSACVVKPWSNIKVCRAECISAIASTSAFAFQGTNGHAIIARHADRDTGTSSPLWHMTSYWVHPCVDTVTSTATLTDKSRWVFRISCKSLDNTAYSYFWDHRIAGIPIFPAAGFFELLATTRQIFRTPLFPECMSFQAIVLLMPLVLGTDGSERIDLLCDGLSDIFNICTVSRCSIHTHTSTRTCYHPVIALQSQPETMQNFFRIFSLCEFQSNIAHDVFGICLGNISIRHDRLSDQRKINDQMILLPAVADAGLHLSAAMKPSDSSFTSRLPACIGTFQISNDRLNSGDSINIAGMNSRVSMEKDTVDQKMMTGSPCHSSTIIRDLEMRQAPVGRVPHIDDLETSKLGTVEGFKNDVCPAPVYYYVEWKFSSKSTSRGPIDLSSDINNIRATQSSNILRTVGTSLSAMQGNSKLLTNVVVVNQGKGKATLDGLCSSALSEVNLTRHDACHLCTRLPTFIQAPFLSGFMIALHQTNECIQSTRRVTAITGGLGGIGILVGKSRLHSGSSLNTLLSRSGRSCKANFASMCTPAVYGLVKVACCDATANEYISCVHNLRRFLQFLSGVQSFETDILHASGELHDATFDHQTSLSLSKVLAPKMVYADAVQSLVSLLPNLNTVFFSSISVILASPGQTNYTAANSYLDAFALTARLRGYRATSLQWGAWEASDGMADGLSNLKTKLKRLNIGTITSNQGLKSLSRILRFQSAPPMVSVVPVTEKHKIASSRKFRAANRCELDSFAVCVLSDIKDVRDSYNLLGHAETDQDEVHISISSIADFIRSSAHQYTQQSSPKISNDEPLMEKGLDSLGILELTQIIGKQFKLDLPSTVIFEYPTIDALAKLVAERVSSSSRFNLLKHSTPKHVNPFISKYKLPRAEFHFPLKKTAVAATSCEFPFEIFDTKDLMISCCLGGVDFQVTVPVCRFDTEMYGSGTRHATFVRNLAVFDGSIFRISALEALSMDPQQRKILGLCIRNYVAISSSTQCALETAVDTSAGVFLGAMWTEYENFLNLFYGYTHGYSATGNGLSFLVGRPSFTFGLIGPNVVLDTACSSSLVAVHLATGSFDKQESVSAHAAGTQCMLMSQTFSILNSIHALSHDGRCKTLDSSADGYGRGECFATLYLQAIHGNHVHRNNTMCLQLRGTGINQDGRSASFTAPYGPSQQFLIRKVNSQNLLNPNSIKFLSSHGTGTSLGDPIELAAVAKAYEGGTGVIIGASKSFMGHTEGSAGLTGFLYAVAACENRSAPSVRCCRTINPHMAVALGSIDQNKHSDENKSTGKAPSKVPSEVQFSIPRLAWSPLKSQDNNVSSISSTSSFGMSGVNSHAIIAHSGSYSDSTGAKSSHVSNMRHMWCAPALYYLCRTAKVSQNEKGNGVYYHSTFENPNIAFLYHHQVCGQCILPGAASLEAVHTCSRTDLPLDFDSIAVINTAFVKPIILTRSTTLVIVRSENDGAVQMNEAAEQTSTCAKAVCQILSSMPPKYSSSLLPFPRVHSIEIKINKVVYSKVLLHGSSDGLRIHPASIDASYHELAALVAEKESQVCLSNRKVGWKSPKVPSALQTYLVIDHEETCHAYTVAARHRLGSIDRFLRSSDDVFDAICNQGSRAKLLALGTKQVRNMSIGKDVLVTNLMIAHHSSTDTTEQILKRDIVCSSTSNASPASSAHVESMQIHLDNIINERSKTLRKRDSGNGLLYGLSWRVGMITPRSDGEAAYARAVHGLGSAYETSCSFEDSILRHVAGATMLMQASETAGISKVTTCIRGTSHCHTSPQSILLSYTARSPIYGVVGTAATEMRTVEFTTIGYSYLLGKSLPQLIDNYQVKDGHSYHSSNSISCAGMQFSSTMHPSGAWIGFGAMQLRSLQRGSLLNLSPKLWSAYDHRIKADSKLALSLTNKMPFISVRVQAVGLNFRDVLNILDMYPGIPGSPGGDFSGIVLGGANIMGASIYRPGHEIFGVAPGCLGTRVSACAHAVVSKPTSLSFAEVAACPTIFCTVYLALESASLLKFPTKRALIHAGAGGIGLAACQVLTSRGTEVFATAGSVQKRTMLRGLGINVVASSRSIRFVEDLLLMSTSPVDIILNCLTSTGMVAASCAVLHENGHFAEISKRDIWSYEASNSERSGGEFRLVAFDMIPIKRLYSMLLHLSRQLQGSCIVPVISKQSGLQALRECMREMSAGLHVGKTVISLPFISIHQGHKGALTITGGLGGLGNAVASWAAQKGFSWISLLSRSGRRNKHPGVLPISLACTLFTRGDVSSSEDAGLVMNAYKQRAMGTIVHAGGVLADATLGRQNVQTITTVTAPKSKSLTRIYTIAEICALKSLLLFSSLASLVGSGGQSNYAAANCWLDAWAVGATTLGVSTTSIQWGAWSGKDGMVGDQSNTAYRMQRSGVGLVKPEQGLAALEGILGTVGQSHLYCGRNQPVFVANPYVWNVINNDNKDNNVARNLVSCVDDNSKIDAIATDNHVVRFREIKNVKQQSTEFFKQVVSGALYSVMGKTVGENEPLLDAGLDSLGAVELRNTICSSTGIDLPATLVFDFPTVGCIVKILGDESRQNHKTVKKVLKKKENRASGRESKNIVEASNINDQIVKKKNDEQQSRMDAMDALGCPNLPDSELTTTSCPALASFDACSSRPTQISEMIFGARDVVARVLIDRWLVDETRQSEMQQARFGGFLCHVDAFDSDAFNISTSESALIDPQHRMLLEAVWQIKAALLTTPSEYAGVTVGISGNEYSRIVNHISPYTATGGALSVACGRISYTFGLQGVCVSIDTACSSSLVGSHVALNSIVSGESKSVSTCGVNVTLSPLTTELFTRAGMLAHDGRCKALDSRADGYVRGEACVAVELRLVNMSTKSGHGAICGSAVNQDGRSSSLTAPNGPSQQRAIRAALQMAGLNGAIVAGLELHGTGTPLGDPIEVGAGHAVLIENAEGDRRISPMLSGIKTFTGHTEPAAGVVGLMNGICQSSSQAVLFILHLQRLNPHLETISYAPNHAKLFFCFAYPRLHSPAVPLPLRHSLVIGVSAFAFQGTNAHAATVKDSPTSSRHHVGTKGTQAITFDKRRHWLRSRPHPFSRVSINLIGSDREARYVLCISSCHQYLFGDHCITGRVLLPATAFLEIGSCATTQIGRTGAYPHALCTSVMSAPLEMTDAMSLGTTFCTLTLGRRNGDLVVRDAAQNRNVYFSKSSRANVTSNKRYLASAKATASLKCAQRRICKYSEVVIGLVNDVALMDGGTEIDLSIHPAALDCNLQLISAFQRTRPAAKLHLPAAIEAYLLVTRCAAGMRWSTTLSTMPMMSSHRSFAEDRSPVHLNNLEVRFAMPQASATPPKHGISTSAALHYMYQTATFISASDTRSSPAKLKSNPASLRLQPSQRPQRHAASTLQVVQLSKGSRVQRLITRTSGPSPEVQGIILCAASEMQDTIRFDIHTSDKRDASNADFDTIISSKSFVSRSGGTVSISIMQPLAVSRIASQINLFGSSNFNGVIDSVISCDGGVCTRSSFASLSFFRAGESTTIITGGLGGLGQLAGSLETHSGTSTVVLLGRLGRTSQILCALAFAYTRVILQRQDIGCSDDFDCSLLALDPPVRKLLHAGGVLRDATVPSQCSTHVSSVFAPKCTGLTQINKKMHAKGLCTVVLFSSIASLLGSAGQASYCAANGWLDESARVDTLRGQTTSSLQWGVWLGCAGMASNSKTNLSRLERLGVGGVSRAQGLCALDAISRTACSSGAVAVNVFARDTFSKLTSSDLTSNFDGFAHRQVRGSTNKIPPVLNRSSGHEALARSCCDQIRVNETIKNIVQSILGTGIMTSAPLMDSGLDSLGALELREEMNATFCIELPSTAVFDYPTIDSLTSLVTAEISERMDDEQQSRMDAMDALGCPNLPDSELTTTSCPALASFDACSSRPTQISEMIFGARDVVARVLIDRWLVDETRQSEMQQARFGGFLCHVDAFDSDAFNISTSESALIDPQHRMLLEAVWQIKAALLTTPSEYAGVTVGISGNEYSRIVNHISPYTATGGALSVACGRISYTFGLQGVCVSIDTACSSSLVGSHVALNSIVSGESKSVSTCGVNVTLSPLTTELFTRAGMLAHDGRCKALDSRADGYVRGEACVAVELRLVNMSTKSGHGAICGSAVNQDGRSSSLTAPNGPSQQRAIRAALQMAGLNGAIVAGLELHGTGTPLGDPIEVGAGHAVLIENAEGDRRISPMLSGIKTFTGHTEPAAGVVGLMNGICQSSSQAVLFILHLQRLNPHLETISYAPNHAKLFFCFAYPRLHSPAVPLPLRHSLVIGVSAFAFQGTNAHAATVKDSPTSSRHHVGTKGTQAITFDKRRHWLRSRPHPFSRVSINLIGSDREARYVLCISSCHQYLFGDHCITGRVLLPATAFLEIGSCATTQIGRTGAYPHALCTSVMSAPLEMTDAMSLGTTFCTLTLGRRNGDLVVRDAAQNRNVYFSKSSRANVTSNKRYLASAKATASLKCAQRRICKYSEVVIGLVNDVALMDGGTEIDLSIHPAALDCNLQLISAFQRTRPAAKLHLPAAIEAYLLVTRCAAGMRWSTTLSTMPMMSSHRSFAEDRSPVHLNNLEVRFAMPQASATPPKHGISTSAALHFMYQTATFIYASDTRSSPAKLKSNPASLRLQPSQRPQRHAASTLQVVQLSKGSRVQRLITRTSGPSPEVQGIILCAASEMQDTIRFDIHTSDKRDASNADFDTIISSKSFVSRSGGTVSISIMQPLAVSRIASQINLFGSSNFNGVIDSVISCDGGVCTRSSFASLSFFRAGESTTIITGGLGGLGQLAGSLETHSGTSTVVLLGRLGRTSQILCALAFAYTRVILQRQDIGCSDDFDCSLLALDPPVRKLLHAGGVLRDATVPSQCSTHVSSVFASKCTGLTQINKKMHAKGLCTVVLFSSIASLLGSAGQASYCAANGWLDESARVDTLRGQTTSSLQWGVWLGCAGMASNSKTNLSRLERLGVGGVSRAQGLCALDAISRSACSSGAVAVNVFARDTFSKLTSSDLTSNFDGFAHRQVRGSTNKIPPVLNRSSGHEALARSCCDQIRVNETIKNIVQSILGTGIMTSAPLMDSGLDSLGALELREEMNATFCIELPSTAVFDYPTIDSLTSLVTAEISERMDDEQQSRMDAMDALGCPNLPDSELTTTSCPALASFDACSSRPTQISEMIFGARDVVARVLIDRWLVDETRQSEMQQARFGGFLCHVDAFDSDAFNISTSESALIDPQHRMLLEAVWQIKAALLTTPSEYAGVTVGISGNEYSRIVNHISPYTATGGALSVACGRISYTFGLQGVCVSIDTACSSSLVGSHVALNSIVSGESKSVSTCGVNVTLSPLTTELFTRAGMLAHDGRCKALDSRADGYVRGEACVAVELRLVNMSTKSGHGAICGSAVNQDGRSSSLTAPNGPSQQRAIRAALQMAGLNGAIVAGLELHGTGTPLGDPIEVGAGHAVLIENAEGDRRISPMLSGIKTFTGHTEPAAGVVGLMNGICQSSSQAVLFILHLQRLNPHLETISYAPNHAKLFFCFAYPRLHSPAVPLPLRHSLVIGVSAFAFQGTNAHAATVKDSPTSSRHHVGTKGTQAITFDKRRHWLRSRPHPFSRVSINLIGSDREARYVLCISSCHQYLFGDHCITGRVLLPATAFLEIGSCATTQIGRTGAYPHALCTSVMSAPLEMTDAMSLGTTFCTLTLGRRNGDLVVRDAAQNRNVYFSKSSRANVTSNKRYLASAKATASLKCAQRRICKYSEVVIGLVNDVALMDGGTEIDLSIHPAALDCNLQLISAFQRTRPAAKLHLPAAIEAYLLVTRCAAGMRWSTTLSTMPMMSSHRSFAEDRSPVHLNNLEVRFAMPQASATPPKHGINTSAALHFMYQTATFIYASDTRSSPAKLKSNPASLRLQPSQRPQRHAASTLQVVQLSKGSRVQRLITRTSGPSPEVQGIILCAASEMQDTIRFDIHTSDKRDASNADFDTIISSKSFVSRSGGTVSISIMQPLAVSRIASQINLFGSSNFNGVIDSVISCDGGVCTRSSFASLSFFRAGESTTIITGGLGGLGQLAGSLETHSGTSTVVLLGRLGRTSQILCALAFAYTRVILQRQDIGCSDDFDCSLLALDPPVRKLLHAGGVLRDATVPSQCSTHVSSVFAPKCTGLTQINKKMHAKGLCTVVLFSSIASLLGSAGQASYCAANGWLDESARVDTLRGQTTSSLQWGVWLGCAGMASNSKTNLSRLERLGVGGVSRAQGLCALDAISRSACSSGAVAVNVFARDTFSKLTSSDLTSNFDGFAHRQVRGSTNKIPPVLNRSSGHEALARSCCDQIRVNETIKNIVQSILGTGIMTSAPLMDSGLDSLGALELREEMNATFCIELPSTAVFDYPTIDSLTSLVTAEISERMDDEQQSRMDAMDALGCPNLPDSELTTTSCPALASFDACSSRPTQISEMIFGARDVVARVLIDRWLVDETRQSEMQQARFGGFLCHVDAFDSDAFNISTSESALIDPQHRMLLEAVWQIKAALLTTPSEYAGVTVGISGNEYSRIVNHISPYTATGGALSVACGRISYTFGLQGVCVSIDTACSSSLVGSHVALNSIVSGESKSVSTCGVNVTLSPLTTELFTRAGMLAHDGRCKALDSRADGYVRGEACVAVELRLVNMSTKSGHGAICGSAVNQDGRSSSLTAPNGPSQQRAIRAALQMAGLNGAIVAGLELHGTGTPLGDPIEVGAGHAVLIENAEGDRRISPMLSGIKTFTGHTEPAAGVVGLMNGICQSSSQAVLFILHLQRLNPHLETISYAPNHAKLFFCFAYPRLHSPAVPLPLRHSLVIGVSAFAFQGTNAHAATVKDSPTSSRHHVGTKGTQAITFDKRRHWLRSRPHPFSRVSINLIGSASQMDVSTRHFTLLKCSTQLFSLQALKDSLLVSMAQDDSHNHTNLCSIVFLGALHFAGLSCNSYDDSNSNCSFVHVDMNLKDGSATLHHGLNILLICCMGNCSFSLRFDPSACTAPQMIHNVRNANDTAYFMLKTLFEVKDACIFPLLLRSKGYHTQSRLSAIECHWDNAPACHSFTFSGNISSTSVRSCQGYSNEDRIIYRTCEIILSPMISSRIITPENIDVYENSIATKSTNMKDTDSRYLVRWRATTSLYSDSRAGRWRINKSQNQTVTSIFERSAGCRISASIISEAQTLCHSRGFRTGAVLLTTQNVSTTAPRSSFGIQGGIDCASAWGIFRVVSNEMRGEISCGIDADFTSANTPSGLVQADSKSGTSIRSGAVHVGSFQKMKCFHRSDQHLLRDCVTFKGNILITGGLGAICNILVTWITTLLISTDRATPCIMVSGRRGRANHLYRWTSHACLVIARMCDVATSEDNLLTSISACVNGQIGIVMHTSGALQDASILNQTPCAITKTSAPKIAGLKCTHKFLLATCPVHQCVIFSSIASSFGSPGQANYVAANAWMDGWADSARRISIGGVVTSIQWGPWTNLPNGGMACSIQQSKLMKQRSFIGVGSLSPKDGVLIIEMLLKSMTYYGTIPTVMLASKFSWKTLLDNAGKDVRLTTLYLLVASPFPRRKRIQNRESRYARALTPSNIETKPCFSLVPFQEPATRSIILATIARFLGYEVDPDRPLIDAGVDSLSMTELGRQIETDVQVPLPSTALFDYPTVADLSAYVTNLIGSNQTSPRPLVSSHHHQATFSTHTHKCSERVGVVGTGMRFAGAGPDGCDSFEKFWQLLASGGDSVTIVPLSRWDIDVDTTCFGVRRRRDPEIEEYSRHGSFIVGIDSFDCKLFGIDSNEAALIDTQQRMLLKVVADAMHGGYLTGKGGRGSNTAVFVGICNNDRDVILREHVVELAMNGGSYNDIVDTVGVIAYSTYAFASNRISYILGLIGASISIDCASASALVAVHMAANEARRDLNIHLRCLAASVNLILHNNLTDLHTARKMFANDGRCKTFDANADGFERGEGVGATLLRNAAEMCDENSLVYIAGSVSIHKGGGASLRALRGPAIQLKVHRALEAANMEPNDVKYIEASGLGEPYGDAVEVSAYQNVFEPERISNDKLLFGSVHTNLGHLDGCSGIASFLKACAVTFNAGAPPLVHFKTLHALMRGKSCTEAAALFGHTLKCTDVSCFPSAFPMSLMPAYSHIIDETKHQSAGITCADCLPKLTSTVSSFGFGGTMANVIVEVGYACTRYYDTHRQVVCEERVIPRIDHRNRCDLQTLAEESLAYIESVVWKSIREVIGPSRKLARHALLLQMSDGTSLNEAEYRLFKALLIERLGVKSLPSSAFSTCTTVAHISHEILIFALRAQLSETGGISVGSIIKAWLKTHARRQCTDPCRIPLSLTLIPSRESLHQIAFVLANPRSGSTLTQLILNANPQLFAPQELYLLHFHTMNERRLRLSGQDLEGWIFEGLRKAVMELRCCDSRAASATLTAFDILETQQVYHILQGWADARILVDKTPPYIWSADTLHRAESLFHDARYIFICRHPYANIFSMTKETIRRDWLGVALDGLVCNKSHHLDSYSKLQEQKLALQSNVERALWEEAENLWALGNENVLDFFTAVSSKKQLTLCYETIVYHPETSSRAMCSMLGISFSPDMLFPFTDKNTSTFLPSFKGGLSAGDPHMLSRRGIHSHFANAWQRAAYPQLLTPFAAHVTKELGYRLPAWKHMTLHSEIPVDVVRLNSSTKEPAMVFIHDHTGDIHFLRSVTKKMATAAFCIRAVGRGKSNINESKEGQSQHQSSSFLCDYDVQSLAARYRSIMSTALEFSRGDKIIYGGIGSFGTRIAFEMAAQQQDAAIYDNNTNGVSTNSWVKEAIHANDGEHSAIGLLLFTNPGAFEVNDKLPLDVQAIHSAKLLLDLQPMASLNETEFNSKLLGLPITCLDAFRQEFAIQGNVQDHRLGILHSVKRSLHVTHRAWQLAELYSSPNRRFEFPTLVICYQATISSVLAEFHGTKDELLEMQSSRAESGITSIMHEFVSQVSS

SEQ ID NO: 12 - protein, 358 aa, Burkholderia pseudomallei
MERCLGKKMSLDDTFAANDMTRFLPELLVAMRRDFDIRLYPNEVTGFLTPAAVSDYLQGEITRHHAVSEAAHVAERANVDVAHRASPEIAFVLSSVRSGSTLLRVMLAGHSALFSPPELHLLRHERMDERDRDDRAPDKDQGLVRTLVEAFDIEPAQANAMIAGMVAAKMPTSEVLARVAQRLEGRLLVDKSPGYSNDIEVLRKTLRYFPKARYLYLTRHPCAVIESMVRNRFVRLMEGGETNPFDFGEFAWMRSNGNILDFSTEVPPGRFMHLRYEDLMADTRGQMERICQFLRIRFEDALLEPYSGARMRDGLGDPNFFEHDRIDPDFVDRWKQAPRVIRLGPASRYLAERLGYQV

SEQ ID NO: 13 - protein, 2858 aa, Planktothrix agardhii
MPTMPDLANQKIAITATFTSEPVEDSLSYWLKAMGFPDSIEFAQYNQIFQELLNPSSLLATNQNGVNVVLVRFEDWQGTKNRLQLTVDDSLKTQLFGQRLRYRLPNHIEIAHLNQYETEYLYQEIFVDRVYLRHGIVLNEDDCIIDVGANIGLFTLFAQQKSPKGTIYAFEPAPHAFDKLQINAKLYCPNTHLFNCGLGGERREETFTFYPRSSVFSSFAADAEQDEKAIRSVIINMLQRDHSLDEESLEKLADEFIKDRLKEETYQVQLRTLSEIIEEYKIKKIDLLKLDAEKSELAILQGINNHHWSLIKQIVMEVHDQEGSTLKQVLRLLEDKGFRFVVDEESMLHGSGLFNIYATRLNLNHNPLSQEWGQNLAQIEQTVKDFTNALKTAITRSPNPYLVCICPPSPTDEKAFNGLHEKLQEQLETELQQNPSICLIKSQELLRTYPVQEYYDPYGDELGHIPYNLTFFTALGTILARKILALKSSPYKVIALDCDNTLWNGICGEDGVKGVKIDAPFRALQEFIIAQQATGKLICLCSKNQADDVFAVFEQHPDMLLQRNHLVNWRINWQEKSQNLQSLAEELQLGLDSFIFIDDNPIECAKVRANCPEVLTLQLPQESEKIPQFLDHIWAFDQLQTTQEDQQRTNLYQQNIQRQRLQENSLSFEDFLAQLNLEIEISPVQKEELTRVAQLTQRTNQFNLTTIRRSESQIKQLCNSGELDCRGVKVKDRFGDYGLVGLLLFTAQENSLIVDTFLLSCRVLGRGVEHQMLAYLGTVAQEKRLAKVELFYKSTPKNKPICDFLTGIEKGLLQEKKDGVLFEFSAQIASETIFSPRSNVDSLNQKTKINLEEITAKSDSLSYRILNYQFFENIAQNLYNPELILQEIAGQQQRQRQLDGEFVAPRTPLEKAIASLFIEVLKLDRVGIDDDFFELGGDSIRGAILINKLQAQLSEIIHFVILFDQKTVRRLAAYLEEHYPKAIAKILGKAITEINDLSQERIDEAKVLQMRSLIPALTSTVDDERDDNSKNPPAIFILSPYRSGSTLLRVILGGNPQLFAPPELELLGFNTLGERKAQFSGRYNFWMEGTIRTIMEIKGCNAEEAIAIMEELEDKNLTSKQFYRLLQEWLGDKILIDKTPSYSLDLETLKRAERNFHNPLYIHLVRHPLATMRSYEEARVEQTFPYEHPFKRRELAELVWLISHQNILEFLQQVSPQRQYQVKFEDIVKQPQKTIENLCQFLGVEFNPDMLQPYKEKKQRMTDGIYAESRMIGDVKFHQHQSINPDTVDQWKDYYNSDFLGNVTWQLAESFKYPNNNHNIPQISRENPTESQTFPVSFAQQRLWILAQLEPDSPFYNMFKAVHLQGRINLEILERSLNEIIDRHEILRTNFQEVEATPVQVIAPHATLKISVIDLQGLSEQEQSEQLQLFATEDQLQPFDLTTGILLRVTFVQLKSESSALLLTMHHIISDGWSMGVLIKELSSLYQGFLLGHASVLPKLPIQYADFTLWQRQWLQGENQGFITIQNQINYWKQQLAAAPPLLELPTDRPRPSVQTFRGGCLSFQIDERLTASLKELSHKSATTLFMTLMAAYVTLLFRHSDQNDILIGTPIASRNYQELEGLIGFFVNTLVMRTRLEGNPSFEELLKQVRSVCRNAYANQDVPFEQIIETLQIERSLSHSPLFQVMFVLQNVAMEELETPGLKISPLSLDNVNAKFDFALQMWEINTEKGNSLQGFWQYNIDLFDQDRIARMSGHFQTLLEAIVANPQEPIGTLSLLTERERHQLLVEWNDTGKAYPDEKCIHQLFEEQVERTPNHVAVVFENESLTYRELNNRANQLAHYLCQNYQIKPDTLVGICVERSLEMIIGILGILKAGGAYVPLDPEYPPERLQFIIEDSGILLLLTQGFLKEKLLLTNLTNLNQILYLDEQSFSLLLTDNPSSQTKTDSLAYVIYTSGSTGKPKGVMIENRSIVNLALAWSDVFQIQNNSRVLQFGSLSFDLSIGEIATALAAGASLYLAQKETLLPSQILVDFLTENQISHAFLSPSALSVLPQAPLPNLQSLTVGGEACTAKLMTEWSKGRNFFNAYGPTETTVCATVARFTKDEEKVSIGRPVPNTQIYILDSYLQPVPIGVPGELHIGGAGLARSYLNRPELTQEKFIPNLFDKAEGSKLYKTGDLARYLPDGNIEYLGRIDNQVKIRGFRIELGEIETLLNQYPQIKASVVIVREDIPGRKSLVAYIVPANQIIALTSELRQYLKAKLPDYMIPNAFVILEALPLTQNGKIDHRALPAPEFSSELSDRYVAPRTFIEDTLATIWAQVLRVKEVGIDDNFFELGGDSILSISIIARAKQTGLQLTVKQLFAHQTIAELAAVTGTSKEFQIEQGFVTGEMPLTPIQHYFFEQNLCQSHHFNQSYLLSVPSNFQSEYLELIWQELFKHHDALRLRFTQSNDNWQAIYSASIDRISVNFIDLSALSDNEQQTAIATKVESLQGSLNISKNLVQIAFFDLGVNKRARLLIIIHHLVVDGVSWRILLEDLQTAYQQLSQGQKIKLPPKTTSFKDWAQHLIEYAQSDLLKAELAYWLRASHTLISPIPIDYSGGTNTVKSISTVSVSLNETQTQLLLQDVPKAYQTQINDVLLTALVLVLSKWTNTDSVLFNLEGHGREEIIEDVDLSRTVGWFTTMFPVILKIETIDQENLGNALKSVKEQLRAIPHKGIGYGLLRYLRRDQEIVTQLAALSQAEISFNYLGQFSQVLNQNSLIQLASESSGLDHSLEGQRPHLLNINAIVINEQLQIDWKYSTHVHKSTTIEKIAQDFVEVLQELIVHCTSPDNGGYTPTDFPLLEFSQTELDKLLANL

SEQ ID NO: 14 - protein, 3477 aa, Planktothrix agardhii
MPTMPDLANQKIAITATFTSEPVEDSLSYWLKAMGFPDSIEFAQYNQIFQELLNPSSLLATNQNGVNVVLVRFEDWQGTKNRLQLTVDDSLKTQLFGQRLRYRLPNHIEIAHLNQYETEYLYQEIFVDRVYLRHGIVLNEDDCIIDVGANIGLFTLFAQQKSPKGTIYAFEPAPHAFDKLQINAKLYCPNTHLFNCGLGGERREETFTFYPRSSVFSSFAADAEQDEKAIRSVIINMLQRDHSLDEESLEKLADEFIKDRLKEETYQVQLRTLSEIIEEYKIKKIDLLKLDAEKSELAILQGINNHHWSLIKQIVMEVHDQEGSTLKQVLRLLEDKGFRFVVDEESMLHGSGLFNIYATRLNLNHNPLSQEWGQNLAQIEQTVKDFTNALKTAITRSPNPYLVCICPPSPTDEKAFNGLHEKLQEQLETELQQNPSICLIKSQELLRTYPVQEYYDPYGDELGHIPYNLTFFTALGTILARKILALKSSPYKVIALDCDNTLWNGICGEDGVKGVKIDAPFRALQEFIIAQQATGKLICLCSKNQADDVFAVFEQHPDMLLQRNHLVNWRINWQEKSQNLQSLAEELQLGLDSFIFIDDNPIECAKVRANCPEVLTLQLPQESEKIPQFLDHIWAFDQLQTTQEDQQRTNLYQQNIQRQRLQENSLSFEDFLAQLNLEIEISPVQKEELTRVAQLTQRTNQFNLTTIRRSESQIKQLCNSGELDCRGVKVKDRFGDYGLVGLLLFTAQEDSLIVDTFLLSCRVLGRGVEHQMLAYLGTVAQEKRLAKVELFYKSTPKNKPICDFLTGIEKGLLQEKKDGVLFEFSAQIASETIFSPRSNVDSLNQKTKINLEETTAKSDSLSYRILNYQFFENIAQNLYNPELILQEIAGQQQRQRQLDGEFVAPRTPLEKAIASLFIEVLKLDRVGIDDDFFELGGDSIRGAILINKLQAQLSEIIHFVILFDQKTVRRLAAYLEEHYPKAIAKILGKAITEINDLSQERIDEAKVLQMRSLIPALTSTVDDERDDNSKNPPAIFILSPYRSGSTLLRVILGGNPQLFAPPELELLGFNTLGERKAQFSGRYNFWMEGTIRTIMEIKGCNAEEAIAIMEELEDKNLTSKQFYRLLQEWLGDKILIDKTPSYSLDLETLKRAERNFHNPLYIRLVRHPLATMRSYEEARVEQTFPYEHPFKRRELAELVWLISHQNILEFLQQVSPQRQYQVKFEDIVKQPQKTIENLCQFLGVEFNPDMLQPYKEKKQRMTDGIYAESRMIGDVKFHQHQSINPDTVDQWKDYYNSDFLGNVTWQLAESFKYPNNNHNIPQISRENPTESQTFPVSFAQQRLWILAQLEPDSPFYNMFKAVHLQGRINLEILERSLNEIIDRHEILRTNFQEVEATPVQVIAPHATLKISVIDLQGLSEQEQSEQLQLFATEDQLQPFDLTTGILLRVTFVQLKSESSALLLTMHHIISDGWSMGVLIKELSSLYQGFLLGHASVLPKLPIQYADFTLWQRQWLQGENQGFITIQNQINYWKQQLAAAPPLLELPTDRPRPSVQTFRGGCLSFQIDERLTASLKELSHKSATTLFMTLMAAYVTLLFRHSDQNDILIGTPIASRNYQELEGLIGFFVNTLVMRTRLEGNPSFEELLKQVRSVCRNAYANQDVPFEQIIETLQIERSLSHSPLFQVMFVLQNVAMEELETPGLKISPLSLDNVNAKFDFALQMWEINTEKGNSLQGFWQYNIDLFDQDRIARMSGHFQTLLEAIVANPQEPIGTLSLLTERERHQLLVEWNDTGKAYPDEKCIHQLFEEQVERTPNHVAVVFENESLTYRELNNRANQLAHYLCQNYQIKPDTLVGICVERSLEMIIGILGILKAGAAYLPLDPEYPPERLQFIIEDSGILLLLTQGFLKEKLLLTNLTNLNQILYLDEQSFSLLLTDNPSSQTKTDSLAHVIYTSGSTGKPKGVMIENRSIVNLALAWSDVFQIQNNSRVLQFGSLSFDLSIGEIATALAAGASLYLAQKETLLPSQILVDFLTENQISHAFLSPSALSVLPQAPLPNLQSLTVGGEACTAKLITEWSKGRNFFNAYGPTETTVCATVARFTKDEEKVSIGRPVPNTQIYILDSYLQPVPIGVPGELHIGGAGLARSYLNRPELTQEKFIPNPFSNYPDSRLYKTGDLARYLPDGNIEYLGRIDNQVKIRGFRIELGEIETVLTQNPQVQSSVIIACEDTPGNKRLVAYIVPQKDATPTPNELRQFLKEKLPEYMIPSAFVILESLPLTPNGKIDRRALPEPEQSYERTDKFILPRNPIEEILVTIWSEGLKVKQVSINDNFFELGGHSLLATQLISRIRTNLQIEIPLRSLFAAPTIEELGQQIQQLQQQDLTLSAPPILPRGEQSELLLSYAQTRLWFLDQLETNSAFYNIPVALRLQGHLNQAALIQSLEEIIQRHEALRTNFVNVNGQPTQVIQTVTNWTVSVINLQHLSPEEQEIAATNLVKGESFKPFDLANEALVRATLIVLNNNEYWLLLCLHHVISDGWSMGVFIEELTALYNAYNQGQPSPLKPLPIQYADFAVWQRQWLQGEVLENQLNYWQKQLADAPTFLPLPTDKPRPAVQTFTGAHQEFQLSLELTQKLTELSQQQGVTMFMTLLAVYGTLLYRYTGQSDILIGTPIANRNRREIESLIGFFVNTLVMRTDCSENPSFQELLMRVREMSLGAYSHQDLPFEMLVEALQPERNLSHTPLFQVMFALENTPLSKIELTDLTIDSLPLEGETAKFDLTLSMQNTETGLMGVWVYNTDLFNRETIERMNGHFLTLLEGIIANPNERVSQLPLLTKVEQQQLLIDWNNTEVDYPANKCIHQLFEKQVERTPNAVAVVFECQQLTYNELNCRANQLAHYLQSLGVKPDELVGIGVERSLEMIVGILGILKAGGAYVPLDPEYPQERLNFMLEDSQVKVLVTQAKLVESIPQHQAQLICLDTDWEKIAQNITSNPESGVKPDNLTYIIYTSGSTGKPKGVLVNHANVVRLFAATDSWYHFNSQDVWTLFHSYAFDFSVWEMWGALLYGGRLVIVPYLVTRSPESFYELLCQEKVTILNQTPTAFRQLIQAEESVKGDISPLLREVGKDSVTETDLSLRLVIFGGESLEINSLQPWFDRHGDQLPQLVNMYGITETTVHVTYRPLSMADVNSTASVIGRPLPDLQVYLLDQYLQPVPVGVPGEMYVGGAGVAKGYLNRPELTTERFISSPFEHSNKLYKTGDLARYWPNGELEYLGRIDNQVKIRGFRIELGEIEALLASHPQIWETVVLVWDDTAGDKRLVAYIVPQPEITIIIDEIRQFLKAKLPDYMVPNAFVILEALPLTTNGKIDRRALPPPNLDISDKYVAPSTPIEEILATIWSEVLKVEKVGINDNFFELGGHSLLATQLVAQIRDRLKVELPLRQLFNTATLAELAQGIEQLKQQKSAPIVPAILPRRRK

SEQ ID NO: 15 - protein, 1470 aa, Cyanothece sp.
MFQDRLRNKDIADWRTELAQNIEQSGNCGDRLLSNPSSIRVGVEKIIIPAPLSQELRYLAEAENVDLGIIFLGIFQVLLHRHTSDDEVPVGVMIPVEDKEGSTSRGDLVKPLVFRSKFSPKLTLSQLWQQILHNHSHFLQQATSIQDCYEGKQSKEEETPLNYPNPLRAAFSMEEMPLIKPSFSDLVLTQVTLNEPILPCDLVLSVRTEGEEITLKLLYDSNLFSADFAERISRHLLNALNATVEKPNCLVEKLPLMDQEEYQQLILEWSGTDADFPPEICLHQLFEAQVKRTPDACAVIHNQEQISYQALDQRANQLARYLQQFEVKPDTKVALYLDPSIELLITILAIWKAGAAYVPISPSMPRERVHFMLCDIQAPVLITKEPFINNDLAFPCQVIRLDADAAQIDGQPNTPPLHQATPDNLAYVIYTSGSTGEPKGVMVPHRGIANTLLRRQEAFPFHQTDRLLLTFSFVFDASIFQLFQPLLSGACLVIPEREHGGDPMRIINAIRRYQITVLGLNPSLLALLVKEQGFEQCDSVRMMFCGGESVSESLLEKINEVTGINVHNMYGPTEASMEATYWTYEPQMRVSIGRPIKNTRAYVLDEQLQPTPIGVPGELYLGGVGLAWGYLNQPQLTAEKFLPDPFSSVPSRRMYRTGDRCRWLPNGYLEYLGRQDEQVKLNGYRIELQEIEACLQKNTTVRENVVLLREDQPGDKRLVGYVVPKNIEQSNPEELRSYLRSHLPTYMIPSTFVFLESLPRTAGGKVNRRALKAHPLTPSSRRIADWSEQPLEAFLAGLWQEVLGLDGIGEGENFFELGGNSLRAAILAHKLEETLNEFVYPIVLYDAPTLEKLAHYLRLNYPQSVVRLFGQEALKGVESPRSSAITEASITTLRELIRPLPTRESIPDSPKNPEAIFILSPPRSGSTLLRIMLGGHPALFSPPELQLLNYNTLGERKAALSSERDNFWLQGTIQALMQIQGWSVEEATEKMQQLETENLSVKGFYRLMQEWLGEVKLVEKTPTYALDLQTLNRAEEDFENALYIHLIRHPSAAIASFEEAKLDVFFPPFFKGAHHFTVWQLAELVWTICHQNILDFLTTIPPERKHAVRFEDLVSNPKETMEKVAKFLDLPFHPNMINPYEQDRAAQMTDKIHSMARMLGDVKFHQHGQIKAEAAKRTYGRYPEEKLADVTRQLAGKLGYELYQPLDKSLVSLETRGESSPFFGVHPMASEVSYYQPLVNQLGSNQPFYVFRMQTLNGAATVPQSIPELAAAYVQELQTFQPEGPYRLGGWSFGGLVVFEMACQLAAKGEEIALLALFSSYIGEFRLEWPAPRFHDFLTGVFYEYGLDLGQIDVDHLSRVQFLELAFVQAKQSGVISPDLAFSDFYRVIRQNWRVYRRNVQLGRGYIPQTQLKHLVLFEAEDRSLDGHGPFENWERFATKVSYHEVPGNHFTMLREPNVSYLAASLKQYL

SEQ ID NO: 16 - protein, 1470 aa, Cyanothece sp.
MFQDRLRNKDIADWRTELAQNIEQSGNCGDRLLSNPSSIRVGVEKIIIPAPLSQELRYLAEAENVDLGIIFLGIFQVLLHRHTSDDEVPVGVMIPVEDKEGSTSRGDLVKPLVFRSKFSPKLTLSQLWQQILHNHSHFLQQATSIQDCYEGKQSKEEETPLNYPNPLRAAFSMEEMPLIKPSFSDLVLTQVTLNEPILPCDLVLSVRTEGEEITLKLLYDSNLFSADFAERISRHLLNALNATVEKPNCLVEKLPLMDQEEYQQLILEWSGTDADFPPEICLHQLFEAQVKRTPDACAVIHNQEQISYQALDQRANQLARYLQQFEVKPDTKVALYLDPSIELLITILAIWKAGAAYVPISPSMPRERVHFMLCDIQAPVLITKEPFINNDLAFPCQVIRLDADAAQIDGQPNTPPLHQATPDNLAYVIYTSGSTGEPKGVMVPHRGIANTLLRRQEAFPFHQTDRLLLTFSFVFDASIFQLFQPLLSGACLVIPEREHGGDPMRIINAIRRYQITVLGLNPSLLALLVKEQGFEQCDSVRMMFCGGESVSESLLEKINEVTGINVHNMYGPTEASMEATYWTYEPQMRVSIGRPIKNTRAYVLDEQLQPTPIGVPGELYLGGVGLAWGYLNQPQLTAEKFLPDPFSSVPSRRMYRTGDRCRWLPNGYLEYLGRQDEQVKLNGYRIELQEIEACLQKNTTVRENVVLLREDQPGDKRLVGYVVPKNIEQSNPEELRSYLRSHLPTYMIPSTFVFLESLPRTAGGKVNRRALKAHPLTPSSRRIADWSEQPLEAFLAGLWQEVLGLDGIGEGENFFELGGNSLRAAILAHKLEETLNEFVYPIVLYDAPTLEKLAHYLRLNYPQSVVRLFGQEALKGVESPRSSAITEASITTLRELIRPLPTRESIPDSPKNPEAIFILSPPRSGSTLLRIMLGGHPALFSPPELQLLNYNTLGERKAALSSERDNFWLQGTIQALMQIQGWSVEEATEKMQQLETENLSVKGFYRLMQEWLGEVKLVEKTPTYALDLQTLNRAEEDFENALYIHLIRHPSAAIASFEEAKLDVFFPPFFKGAHHFTVWQLAELVWTICHQNILDFLTTIPPERKHAVRFEDLVSNPKETMEKVAKFLDLPFHPNMINPYEQDRAAQMTDKIHSMARMLGDVKFHQHGQIKAEAAKRTYGRYPEEKLADVTRQLAGKLGYELYQPLDKSLVSLETRGESSPFFGVHPMASEVSYYQPLVNQLGSNQPFYVFRMQTLNGAATVPQSIPELAAAYVQELQTFQPEGPYRLGGWSFGGLVVFEMACQLAAKGEEIALLALFSSYIGEFRVEWPAPRFHDFLTGVFYEYGLDLGQIDVDHLSRVQFLELAFVQAKQSGVISPDLAFSDFYRVIRQNWRVYRRNVQLGRGYIPQTQLKHLVLFEAEDRSLDGHGPFENWERFATKVSYHEVPGNHFTMLREPNVSYLAASLKQYL

SEQ ID NO: 17 - protein, 11541 aa, Ostreococcus tauri
  MOD_RES (278)..(284): Any amino acid
  MOD_RES (4840)..(4841): Any amino acid
  MOD_RES (8156)..(8162): Any amino acid
  MOD_RES (9591)..(9591): Any amino acid
MTGPRARLSASPTGSTARNGSKKSSPRSEARARAAGATAAPVRYDEDGRVQVAKDARKVAVALLANKRRRALSPENIAKVNATALFLVTVSFSYGLIKQHAFLNRVRRSMEEEDVKREAHALVTEECASTSDASENTMDVADDLARTRHAEHVRNPQPFFVQTVHAFSRGDVTAMEAVAELRRVGVRVTKAFMESARLALSFKDPIPHHSACEDGRGRPGALSEPYVKQLAKIVKHYIRQGIRLSQATILSIARNFYLDEHGSVAPLNALGSAWFYRXXXXXXXCALEMHGTGTSLGDPIEIGGAMCILKSAEHVEVHAMKSRMGHSECAAGMGGLICTLRGLESRISPSIMHLQSLNVHVYEAMSLQGAHESSAGMSRSMAASSKYTQHQAACGGTSSFAFQGTNAHILLVSSLARRKSKCSELSIAFNGTYRVNPYALPHLMIHHRNNYIHQLQYSAQVSKDHDKSPESIIGTVHSIISTTSGKTCSFIVKTTFQRFDTTSNFTICLLTSKFTVYTFDSVAVCTGGISHGICVHGQNYAMPSVVFSCVRCRDAIVQYATLSHEKTCKQQVKLMSTLSHMNHISMIILSRHSRDRENTTISISRFGNSRVREETNVSTLEYVAGTPYHDPGQPKAASSMYQTCWMYESAIKRDTRNSETDTAKFISFAKYASHRHTRSQNHPINFELCDLIQQSVGNVHDLYESLRHTFSSVMSLLNAVRTNTRKNYILAHETLYNADVLQCGYADCTFEGIEALFYAHQLECPSIHISPLSKSYRHKHSNLSDSACRKRIIGGRLLTEKVVNTLTRETFKHRNLDAFTGCRTCVAFGGSRGITTSLIDHLFACKPTLHDYLIIGRTGKSCSLRFHVCGAHAHRSDRIIRILRGSVCDQHELANSKIRSDSCQDEKTCAIHAAGVFDLVAIKFMTPEQLFKTFVPKVATAADELMDVGFHLHPIHDDRKDIFFSSLSAVFGLSRAAHYAASNAFIDGLSQTLHNFGGDVVSIRFGPFKDAGMASSTTWGSAFGLSSIRPCEIFNMISRYHSLHACPGVICAQIDVHKYALNYTSMLGCKEGSSRHWGLLDELLGRQIVRAKYQFSTDAKYAKNSNKTRSAASVVKRALKEIGVVQQFSMEERVMAFGLDSLFAIEFAESLSSQLKITIPKTVAFEYPTFGSLINFLTDELTDPCADERMRNHEVLHARRLDYHPTLDQKLAELHTFVKNIHNQSALQQHNLLSDGINLLAERWTTDSYKFCEEEQVILRPSFGGTIQHVYHFDADLFDLTYAEARLCDPQQRVLLHAVKCLIEREYNTYKTSGVFVGITTSDYAAVSLRTPKMNPCFETPMNVSNVASGRISYTFNFTGPAMSIDTACSSSLVAMYFAHSRPPVSNMGENFALGVNLMFDPKTSLVCSAVGMLSRDGRCKTVDIEADGYGRAENYTGIVLDHIIPIDNRFLGDELAHFLASELNQDGRSSSLVAPSGNAQFELIKMCTSRVLSQTSDMVDESELHGTGTQLGDPIELAAIQRAYCSSRGTPIVFQASKTFQGHSEAASGIHGVAVILFQRRLNRFFLTLRQVNSIVASSVKEHAYVSRFSREKSSSNTEMKSTSSFGYSGTNAHAVLIDRLDTPCGSERPKRQGLFHVYEYRRLEEVHQTQCRGFLFQRLSSTQTKIFFSAHRHVQENYALLDSCILNVKRISDTRVQLMRRCVGTATSFSQTVSGMSIDLHLGNLLCTDRIGRQILKMYYGTFIIGNRAQSNMLALILPTSCDATACVSCIKLSYVQRHTCGRVLFNVDLAQSYVASPACPPRKVCFSIFYVKYSECTAGILTNFVRKPTSISRIHILRRLRDNQNKQIHPNAFKSPICHSAACNRQNKNIKCVERDIAGIVYSCCDELGIPLCGRDKTLLESGVDSLRIMEFFATLQQRLRCAVPSTILSNMVTFNQLIKHLELNQSNYRTRADSYSPLSDEIAVPSREQALYLLHFKLYPTSCAYNISIILDISTQSDAVVALNSILLDNPILRCRFSPNDCVSIKSFESIASIPILSRVDEKCLAMHQASDVLLAEARSYPFDMFNDAPIRVYRVSSKKMLVVLHHSVGDALSLMAIRHALRKNRRRIQSRPSESYSSWFQHLAEQNKNSRISSQKALAYWRSILNSKSHDGLPISRLRKDLSTPPSESNILLGAGVRVDINVEVANMLKSTARLLRCTSFTILFSCWLTVLAGITERAVSFPNRVHMNVGTSFDLRYVAGISQTSAIGCYATVMPGQFVFDTCLNIADMIKCVIAIMARIQACPHIPIHDIIDSLSLYRDGDSLNSNPLFETCFSFVGGAGQKQRRPNVDHFQQAVFSLWMGLQENDSGIGGMLMYDANKFARLTIEAFVLSFSDLVYEFCLENVCRSHSSLKSILLSGNLSVEGHIRSRGLSANRHAFNKLARKIFDSSQTYKHELICSAVKHGCRVTYISNSVQTYLDTHAHVEACRIYILRLLPKHRPRRIRVYVSLPDLYLVTVLRYTVSSMNGILFNDSDTGRHVSKTAVHTFSPHLLFGTAKSLMQHSPTGVFERDVIHVDSGQPSDELNSMTEWLDQVNEVLPAIVEKSLQASGHTKIIFQSTQMYSAWVFALQLSLALNHADALILAQGYEVRILHLVITSAVLDADGRLIGMRTNDVDAILRTIGRERATVSVLPYRVLDVFSNDAFNSHVDTSSLRLVVVYNTSRCELSRWNAATIKLGCDLICYGSSYRSTHLKGHQSRAIFNRLDGSWTFGWQTIGGNDEARELRIVSREGDLLEPFDTSTGEVQCVFDSSRTGGLDRTEDGWFRTLDLVHFQEDGSIEVLQSVKIDQVEQNIFQGIRHSEGLHSPSVKQSSLEIAVESQAKQGDVHLSNVESIHFEKDMLDVDEDRVFRNAAVCTSQSAVYIIASTHSEVKDTDNISHSRLWMPDSAEQIGTAVRCAPERRHFCSYDQLGEFDANIFRISRQEVRSMDSQQRDLLLHALKMMVLPSCVDSGLVLGISQFTDCDSNVDNRAVLGYAHSVASGRVAFFFDMRGPCISIDTACSSSLVSVYMIMNFIVTAECRLGLPAGVNHIISERVTNALSELGMLSPDGRCKTLDAHADGYVRHEHTSFLALVDREKTSPHEVGNLSDVRVCAVRVNQDGRSSALTVPNGASQVNLLRKTSEESCVCPHLLNVYLHGTATTLGDPIELTALFEAVAPNTLSIGLRAIKSIVGHGEAASGILSIHFMVIESQHRLVPQTLHMRKLNAYILQDISSKCNDHRGIHIPRSRTASNESSDLNRCFGISAFAFQGTNAHAISSFRLMPEHHAIQHLATPILHTQRCSVSELHLAVACNTRSQIYAVPVDVNLYGDHNISGKVVCPATVLYRIMLNILGTGPCEFHSARMTKFILDVTISRPLCLNQSVPPLVVRMSVSASGSCAILQNNSSDVRPVQLAHGFHATSCFLTTLPVESSAVAIGQRLLHSYECLSLCVSFASIDCILLSGSDRSKYEDCSLQLGFATSVDCPAPLPRPCLFIPAGVKAYAQCTNFLQQKSTVAKAPSLNRVHSAESRSSHISADELLRINFMQMISRNVKHITLKDTNNAELASKAIACAYSVLASPCVQQDASVRCIRSTSTIQSHSPRRDARDTSDFLQFGHVRTCFSSALLIRPFIEKDQVDFNALARIAKAEGCDVQIETVFVPRYNAMGFRRDNVMVREPRNLYWVGENGQVHLKSIHVVKLNKVHHFTRRYMHGLIEPLTVVRDGTLLRMTGGTGHVGRSILTWHCSRGPVTAFLHGRTGRYLTQDLFPSSSLVQFTRSDRMWDSSNHARVYHCAGILHDALIPFQTASTCMRVLAPKLSVTYICDDVSTLLNFYTVVYCSSISCLLAPKGQYNYTAANSFMDISSLRKRVGGRCVASVQWGAWAEGGMATGKFGSGTEMLSTREAVDLHARAITVCRTILICPIDQTSIDVGYNPDLSAYVCFGRGKTRNQSCTKIPAPILNTQSRIEAQVADILKAVTTQDTVDIPTWEFDSFSAIEFSEKLAASFGVKLPLTLAFDFSSCVDAARYIMQMTGDRANVQLTRGMKAATFTKLVVSLGHIAGSYPTIPFDSFDHISRVPYTRWDIFARGKEQTESTAMFGSFLCTKIDTFDAKMFRISFSESTRIDAQQRLALIDTLSCLHGSSGTNTSVFVGLSSMDHVSSKSRKPILATDSAFSVVPGRVSFCHDLGGISVAIDTACSSSLVAIDIARGRLSSQKAAAVIYSVNVLLLKSTMTLFAVAGMLADDGRCKSLDTAADGYTRAEGSCSALITSHNLNESENGTIQMRHEICTILYSIVNQDGRSSALTAPNGQAQQSAVVQILHLAEAGGVGQSYLHSTGTPLGDPVEVGAYLSGISEARHERNLTRLTCSKVRFGHSEPASGMVTFSQLVQHATSPDIGNASLRTLNPYVEDRLGNAEIFVNRQFCRDPHDTPTTCKTMSAFAFQGTNSIVATSFHQSSQGANLNFRTFIDARRVHTCVSHPQIREARSKCEFQLSFDGLHSLYMLDHRVSNRPILPHTSIMEIFNSVHVRLCPLHHAVRTGNELTRMPIVLNTRIAKEFSVEVDMDRSRVVDIENRVHATAEAMYTSRYAEVSKFNTIDGSSKAQRVIIASRVKSSVRKPYVEQTFTFDPNAMDCSLQLRACTARQGASRALMLPVTIGTSFLMNHSQSCTIACSLSTSGCTYSDHRLHGSDSNSVLGFLSVGFRQTRVGRSITRDNLERSAIYVHASMRSTILLGCSQVVKKDRNCTRGLVDVHRGLYSLTTHQSIRSNTDRIVSSLLSIAANQIKQAYTYAHLESCFTSSTSAAVKAXXNAAKRQIEGLDEQIKQGEFAPLLSWLRTNMHERGSECDTVDELMIKVTGKPLDANHIARARSTSRTAYTRIPGIRGCSIRRSYLLSRDRYRSMLNGGLGGISRLITKQLYISGTTHVELSSRNGRNEAFDAGISSPFACVSVLKTDSSCSSCFSVLDQSRFPKFDSVLHLSGILRDAMYANQNPETIRVSSAPKLKPARQMCSKLWMSPVQQFVVFSSTAHVLKSVGQANYVAANASVDMFCYEEHGSGQDWKSLQWGAWNCDGGMSSDKILRRLTIMGAGQVDEKSALRMMEHIIVSDLPSVVLINRFPRDTILSYTRSYLGVKESNDILYSSLSDRSTCGDVSKLRTAVSEAEIRNALLEIVNTVMGVEVRTDISLLDAGMDSIISVEIRDRVTREFQCDFPVSLTFNYPTVRAMSKYIFDCVCPKEHEASDKEITFPAVFDHGSYAITAISAVLPNSDNHLNTRWAVDTDTFKDGREVRFGVALESHDYFDCQFFHVGRREALHLDPQQRIMIVLADGCLISADEDTNEWGVGVGVSSAEYGTLCVQSLGPFAGTGTITSVISGRISYTFGMQGPSICIDTACSSALVCTSVFHLEVSGSLRGCCIGGMNLTLLELTSIVFQSSKMLSLDGHCKTLDSSADGYVRAEAGVMYTLAEIDTDTYSWLFLHGSAVNQDGRSSSLTAPNGLAQEAVIRRAAILDEGFVQTHQLHGTGTMLGDPIEISASMNTYTQLNGPVTCQANKSQFGHAEPASGAVSLIESIDNTTGNRCREIRLLRQVNPYVAEAFTHAYAAVKTPRAASQTTLNAAQMHVFSSASAFAFQGTNAHVTLRKTRYAGARQGRMRSRCRILIHSERIWVEAHFIPPIHSVASVNNGEDKHIIIRCKTFDVARSGLFHHCVHGRVIYPAAGMLILCCSLTQTLGGELIQCLDYSSIPTARVISHIRKDDNTTFIRVSGRDRRLNVFSEKRTYFKCRPRCNNCVAMITEPKRAPYIPYKYLPMKTMVCATRISIQIDYLHNHGCMSLDNAFQSSAALHCFSSKASYIPTSVCTFQISSVLVNTSVKSTSVQSPSTQMSPQHKPSLLNLNYSIRAESLENGAAAGFQMKNIRRAVLDQQRGSSKRCLWELSHYTVLKDAQNGQQLHTITRRDKWVEIETHRIVRSASSTVAHIANFREHRVEITGSSCMHARYTVTGNAGIIRTELDLQAAEIARKYMFIEAEGSHVTPGYLSSVPRTSVLVKPIASTNVCGKIIKNANQMTAKRRSVTVCGATGALGSCFSTFFLLHGAANLALISSQGRSQTSHVIRSASQYSIIIELMKRDHAATNQCEPLLVRSRASACVYASGSLHDAIVVRQTPRTMMTTSASKLTGYVREHRMANIDSEQSIACSSIAGAVHSFGQFNYSLANASIDKSCVAMFNMGFRTSSIQFGAWSDAMSGMAHLRQALRTRLLATITVSQGLYILNMLVAHLAPPTLMASTLPSEICGLERSVAARKPTITAHRSARVTSNEEITNALRHMILHAVGDESVSYFDDAQPIMELGLDSLAIADLRQAINDAFCVNLTAVSMFDHPTVRELSRAVAALMTGAPMMQTFHTGDLKTNVQYIDDSRRVFTIARVAMKYPLGIDSVQTLRAVLKSGTNLHKSLSVRFDVELLRASVKFAVLIDGLYQFDNRVFSLKNQETMCMDPQQRYLLLCCADCLSFLEDKRVFDAGVFIGIMWNDYPRILRHTKLAQQSSAGTGNGLSFLASRPSFTFGLHGPSIAIDTACSSSMVAINSGCNSMRETGAPSALAGGVQSILIPDTFVTLASLRAIAHDGRCKTLDESADGYGRGEAFGILHVESMSDSTGVDLCMIQSCVVNQDGRSSAFTAPNGLSQQRLINLALQQAGAKVLDVVYVSLHGTGTSLGDTIEINSLMNTCSKFASTRLGASKCILGHTEGSAGVAGIIDSIACACSSNDFGIRHCRNFNPHLRIMFAKSACASRAVTAVHQIDLASSSSFGMSGVNSHTVLRTCKRATYRSSWSARALDSYTFDPGTSALSCSTYLLDTRRSIHVCAYIINLIATKCSHLHDHQVNHASILPASASLLVHAIAIDMSVVNCLHHSHVTFERPIVMTAQNIVHVSVRRDGYAQLFCSGRAAMSSRMVHSLSTCSAVKVYRMKLAPARLIACLMKIQPVQIGLEYAMPLVARIIDNSLQTAFCMRFSADPDTGGKVHIPASIGLCHIRFIHSGKGFNGTNTCDRGSLSTGNHTVVKVSTLRTLCCKPIANSRIMTDVVVDERRTIDRLYSVHWYAACPVKRWLSSASVPLVKCTPDVSAHYQRAQRPATSCTALMQSIPGSQKKVACKTRNIGEHSFRTKTMLDSVSNAATSVIPMVAISDLNANHQLEVGSVSILLPSQNKGDMGSTRSSKSGDTLRVHHAGGVTHVPVIESSRSIPKSAFTLAPRPRGAIKDLTPVPMSHFHQNYAATQAYVRARVMAVGLNFRDVLNVLNMYPGILHPPGTDFSGIIDDQTHPSNGDAVFGLTTACLGDAVHVHESLFCEKPPSVDFIEASATPTILLTVAECIKSARDDRATVPTHYLVHGATGGVGLTVKSICSIMGNLLSGTSSSVQKRALMRCLGIQSMANSRSSAFSQSILLSSLSESVRVDVVLNTLTSPGMVSASLSLLSAGGKFLELSKRAIWSTSALKKENIEACYKVLAIDNNPILELGFHLRLVGVLLCAGVMNTALCLNYQFKHVRESMREMTRASHVGKVVVHHDLLTAGHHLVTGGTGAIGTCVTDWLACLGASQITVMARTGRNNEGMPETNMASCMTFVAADIANEETVSILMSHGMHNVIGIFHTSGVLKDGMIHDQSAMHHDVVSAPKVAGSWRLHDGFQSGCALATFLNFSSIASTIASRGQLNYAYANSYLDEWTALSKFRGVVSNCVQWGAWLLGKGMANTSKGITRRMERIGIYHIAPAIALSIIRLMTIHCQSSQLFSMSAPRILATGLNGKKFAQFALKARILHSSAQTSDVNLEHIAQKVTGLMKPPSHARDESSVIRRINSIFKEISGLDLNIDAAIMESGVDSLGAVESRNAIADAFSLNDLPSTLIFDHPTVKSIARFIMSKFDDTHANTSTVDAYARVLMNPNKSSNVRICSVCFPQQSSETCDHVATVPQSRWDVEFTEHSPVRFGAFLLNIACFDVEMFSMRRPEAVGVDPQQRLLLECAVSARACAPGARLSEECGVVVGISSNDYSMITAQSGELRATGGSLSVACGRISFMYNLHGMCASIDTACSSSLVGSHMARNAVGTLECDSMLSCGINITLSSSXXXXXXXGTTQPRQNRSMRMHHASRIASLAVQDFHVSSKLGVMNAKVVEMVSTCPRLLADTQSSTGPQISAAAAIWGILRTGTYEVPQRVMCVDHETTDAVRCRQVYEVDMSVSVQSQADAQSIINRQIRVPLLLRCGTTTHTEFDLRKPYQNFVKKCDTPLYRDTLNVSVYDKTRTDVYTGGIGGLGALVHSWNANAHVRSFILLGRSGRGQLIHPSTSRNAFALSLQRADVCTISEVEQVISLHAKGINVHRVLHMSGILKDSILLRQTFSDVSVVFANKVCGARATCHDNLLQTTSMHVFFSSIAALLGSPGQGNYAGANSFVDALAQIGTTMGWCCMSLQWGPWDGQVGMAARSLLDESGTVQAMAVGMIDPCIGLEILHALIFSPTYCSTFAVCPLNTSLLAASNVCQVSELKMTRAPCKIDSMSRTQGVAVSEISGTRNSNNSADSDTIMIRVTQIVNDAVGTTVHAKQPLLDAGLDSLGAIELRSRLNNAFSVHLPSTVVFDHPSPYELAEAVKKEVSPDHLSDTSPSNKKTDKDNTGALHVRICSVCFPQQSSETCDHVATVPQSRWDVEFTEHSPVRFGAFLLNIACFDVEMFSMRRPEAVGVDPQQRLLLECAVSARACAPGARLSEECGVVVGISSNDYSMITAQSGELRATGGSLSVACGRISFMYNLHGMCASIDTACSSSLVGSHMARNAVGTLECDSMLSCGINITLSSSTTRVFQNAGMLAEDGRCKTLDVSANGYVRGEGSLVLHMISQNMITENQLCAFHVSGSSVNQDGRSSSLTAPHGPSQQSVILHTMLQPGNGETRCSGIELHGTGTPLGDPIEVGAARAVLDQFAAVSVLQFSAMKSWYGHTEPASGIIGLCSLCESTSQHTSSVIVHLRQLNTHIRDILRRESTPDECTFLTRQKTQNTQTHGAYSVSRGVSAFAFQGTNAHVTVRRDSPRKKFALLSFARHQNSCWVSQAETGVSIETMPIANDHIVVRLPSCESRPLDRDHRVNNRSVLPATSFLELILAGVNQLQEQTLITVCGTQIHAPCLLDSIQHQHCTLWCRVSRLTGRVSLDSAGVRHTSSKIAQPGCSTPRTQACSSPVGCTLRPVQTVHFSFGGGKVRNGDSKNGAVLDAHLHSLSALRVHTHDGDGVREDDLHLPVSLKGYSRQILFREYHEYGASYFEMRKQQSDHLAQPSSWSQVKMLELVGKRLTKASSIRSVIHEQKSVDNAAFGHIDHNLVYVVTWRAVGHRGQPLHRGTTQPRQNRSMRMHHASRIASLAVQDFHVSSKLGVMNAKVVEMVSTCPRLLADTQSSTGPQISAAAAIWGILRTGTYEVPQRVMCVDHETTDAVRCRQVYEVDMSVSVQSQADAQSIINRQIRVPLLLRCGTTTHTEFDLRKPYQNFVKKCDTPLYRDTLNVSVYDKTRTDVYTGGIXYSQVTSKLVSLRDIILSPFVDSAMLSVNIQRDKLCVGALRKVIHAFVVNGPPCKWQTCKMSHFRVPKHTFLQPKDEESYHEVSTSRSVSSFRAKCLRKETQDSVQESLPLCTCPDYFSHAHHAKTFRYLKTIRYYCLSLDDSASENIGTTSANLLGHTRQKLNRLNNEASTLAETMLRVSTSELHTVCRKPPKHASTRDLSFSKRTFYTHELKWLVDPSSLDIHTHRKQIEARRMYLKVKLGSAKESKLATVPSLHILHSIGALTSNGTSLSVNTLTKSALDHFHSSVSELATHTTHSAISTLPRVFCTEHKDVTFTVCGDCSVDAHASHPRFMAGSTSFKHTNKVRGTNLVPKMCGTQQLRGPGYSMKVKQRSEIVLHGIGAIGQLVHVMLHVARFKYVRSSNRNGRMTQIIGASEMDSCCTTLNAIDHCGHSDTDEWRDNVRRQLCTLFYLAGVIQDGIVKNQTACMIRAVIAPKATGSISAYCNPSSLHATAHYFSSISVLLGTFGQVSYVAANALLDSYCEHLNQQGVNKISIQWGAWVDLPGMMKSDHANHRRLSRLGVGAVRTTVGLHVLNLLICDVFESGVIIANAFVWERFAAPLFTHIHSLSENTSVGIQALNLKPLEIQQGVSELVVSILGRKIDADMPFIDAGFDSMCLAEFSQSVERRFDLPVPSTVTFDHPTISSLSAFICDKSANLPTKPSCSQLEIDCEKRRETTTHVVAESFALRTGGTGFQEVTSPFDFWTMITCGQDAVRRIPTDRWDVDDTSTVHTIRKRDPVYGIYSKYGSFIREVDIFDAKFFELAPSVRHIIEPQQREILKVCREVYYGQDVHVKSTPFENTTSVFVGICTNDSEAVGRDVVVRSALCGVISTREKNILPSVVQGMSESTYAFASNRVSHMFGFQGESMSIDCASASGLVCVHLAMNSLKLRGVVNVVSDSAIAASVNMIMHRQLSDLHIARQIFPVDGRCKTFDVSADGFERGEGTGAILMHAASLTRNDPVRFVLAGSSCIHKGGGASLRALRGPAIEYKVHCALLNSALLPKDVTFVEASGLGEPLGDAIEIGAYQTVFCSENLSRTSTIGFGSVHTNIGHLDGASGMISIIKSALMSCSMIAVPLVHFKKLNPMMLGHSVGEHAEKMGHTWKDVNIDGRSYFPMLKGPILNGIVGTSSFGYGGSMAHVITSAGRTSIMFRGMQPRRGVVIPRLNAGNIHTRSPIVETAHQQLQKLIWFEVHDIVNSKRTGSFPVQNCEFCDDITVVSIQRVLDTIAMDHCPYRLAESTLRGPIVANIHDLVVRAMALELAVDGINVNERVCKWLDKQVQRYKISTDPDEHVSPDSNQLQMAKLDRKIVFVLASPRSGSTLLQMMLNTNAAIFAPQELYLLNFETMAQRQKALSRGHSWALEGLRKAIMELRGCFADEADKILEDMQSLSTHKVYTILQEWCGERILVDKTPPYAWSLDNLMRAEMMFKNARYIFIHRHPYASINSMVKETLMTGTDRLKESMRCLEIPTCDQRARSRDAACTQVWNFMDNLWSQGNSNIVDFLKGVDKFKCVDVYYEDLVSNPMQTMRNICSILNMAYNDCMVHPYSGDGTRTFEPVEPGGSGAADPNILNHREIEPRLANAWNSVNLIGKLSEKSMQVASALGYRLPIWKQLGTQSNRKVLKRLNAHTRTPVILFIQTNLDRTFKSWDRFIDSITSAAFAITVDYNTSHATCIADVAETFVRCVRDDLGVTTGDEVVLVTRDSGMHVATEVIRKFASNTVAKTASAWQSHHSVKDMKPTVLGLIAFLNPQFERTLRVDAHGVADAKKYSVPWGTSNTFNILAHERIDHRFDKHRSGPIGPQMNAQNTRHQDQLLNESKATRRLFTLSDISEGRAKRHSMDGLPVCVITESEHVCPEYLSCHFGVDPTTLLLERITHNGIIDECLVESILISALRSVENDKQSK

SEQ ID NO: 18 - protein, 18193 aa, Ostreococcus lucimarinus
MRLPNVSVRTYFPGQGFPYLELCTSNSASEQWCGHKRITHHFTSAFDRLYWGVFDELFSVQTDAFDHDVDLSSFYYFASMQSYGKCPEETLHTAKLFQQARSRRRFDPTVYRHGSLLLRRPHFSYNVSKIAPRSTEYAFNFAGQGLSALDETSIDNSDAYHIRIQCYSKSIPMKVRLIDKFAESSISSSLTYIVHFSTFLKSSKLLFRKIQPFYHSIGHSQGWISQEVSSNIFSTGAKFTYSWMHWAYPILIAKFLLWLSIRAKSTVRHMTVFCDNDLRNQSLCNRVHMFAFRGWTRAKVAEFVERLNTQLYPAERIRLLLENDNDSFILGGSTTGISIFFLVAEAEAERQTDLIDTKTKINKLCPILVTLPFHYGKMLVASKFALMRDFQQRTDFFNCSGTPYQLVKSDSRDVTNMHDTFDGTILYPCARLAEQRYRSDIDLAPTVEDNNIAKEQVTSLCDVLLFGMPSSHRLSSNQNNQTCAFSGKHPKKCVEKHDKWLVLQALQSCAHSLSPLECVYEPIIHSLGLSSAQTVVIIAEMSEYFQIDLPTTFLYDYPTVNDITAFITNTDQSTYRQSTETTQNATVEHELRQHSENHLFLLATRTHVLVSTQLTQLLETDHYYHFDENLSCAMWKLRNVSNFDWQGFRIGKAEAISMDPQQRLLLHCVSSLCLPKYTISHTSVFIGIAWMEYGEVMRTTTSVPASALDATSQALSVASGRICFTFDLTGPAMSIDTACSSSLVAVHLGVASVFQSECDSTVTGGVNLILTETTTAMFLRAGMLAPDGRCKTLDAAADGYVRAESCDTLLLSPTANVNSESVWLCGTAVNQDGRTSSLTAPNGPSQTRVIKSALANASTRPLEVRALEMHGTGTPLGDPIEVGGAMSVLGQAETLRLHAIKTNMGHAECAAGMAGLISASRAVEMQRHTGIMHMRLLNVHAWHAMSINPSQEPNVAVPRSASASCQHVHKANAKTGTSSFAFQGTNAHAILSATARNSGCSCNSVASKLFSCNQCWFASPVHSSGASIKVCHNSIVSRLHQPTPVLSDHCIHGKPLFPAAGYIDYMAQACGTFDLHTAMVQDLAIVRPLLLQYHQRIEVSVRAITGAIKVETSQGEHCRARIKHASKKCDRHNTLYVFSSQTLSPIFDSGRRLNIALAHVETASTNFTSGHVPSIIDATLQISVGVIDGQKVSKCVTMLPTIIKFCSTSPPEITSVRRISTRCNIELDSHGESLGNHLVGCVVLFKVKCKMLRTKANGYPHKNNLSNGINIVKYVSRFSPSTSLRPCTTQAHARFISLMREKIVAHAVMVLHAYVLQMEGRVELCETNSIKYLASLFRCAETECIKENVSLVVRGEDAPFQHSSILLQAFTQYKSLRKFHVLHRCLKESLAQQLACSNRKIHKIKLDRNKSEFIASCDLNRSYFIMGGTGATGQLTSTFLMRYSSPHTLMSRFGRTNCMLRQHQYSDSVVSFVQSYVHTNIQINRYAVDSLCFIHAAGCTSDALLLRQTPARIREVFAPKVLTIDADLYSSKPLLSAIFFSSITARIGSPGQANYSCANSALDTLAQFEHTAGRPVCSVQWGAWGKVGMAIRNKYIERNMSRLGVGFMDPKTALAALKSTMRRIENAPLSCGAVLVVCQNAFTSDSTKADWLLEKHTTGLQSVHTRKIADKQTTLERQKKFTTSGVRCHTTQDCLSLLHKMVCTLIGFDVDPDIPLHDAGLDSLSAIELASKISTHFDRQVAPSLVFDFPTISKLCTYLMQNVEHSCDEAHGIEALCRSPQNAPFVQPNLQCVLAVSSGTSHGAAGVANCDSIALMPTARRILSDELGESDPRLKVGCFVESIVMFDWQGFRIGKAEAISMDPQQRLLLHCVSSLCLPKYTISHTSVFIGIAWMEYGEVMRTTTSVPASALDATSQALSVASGRICFTFDLTGSAMSIDTACSSSLVAVHLGVASVFQSECDSTVTGGVNLILTETTTAMFLRAGMLAPDGRCKTLDAAADGYVRAESCDTLLLSPTANVNSESVWLCGTAVNQDGRTSSLTAPNGPSQTRVIKSALANASTRPLEVRALEMHGTGTPLGDPIEVGGAMSVLGQAETLRLHAIKTNMGHAECAAGMAGLISASRAVEMQRHTGIMHMRLLNVHAWHAMSINPSQEPNVAVPRSASASCQHVHKANAKTGTSSFAFQGTNAHAILSATARNSGCSCNSVASKLFSCNQCWFASPVHSSGASIKVCHNSIVSRLHQPTPALSDHCIHGKPLFPAAGYIDYMAQACGTFDLHTAMVQDLAIVRPLLLQYHQRIEVSVRAITGAIKVETSQGEHCRARIKHASKKCDRHNTLYVFSSQTLSPIFDSGRRLNIALAHVETASTNFTSGHVPSIIDATLQISVGVIDGQKVSKCVTMLPTIIKFCSTSPPEITSVRRISTRCNIELDSHGESLGNHLVGCVVLFKVKCKMLRTKANGYPHKNNLSNGINIVKYVSRFSPSTSLRPCTTQAHARFISLMREKIVAHAVMVLHAYVLQMEGRVELCETNSIKYLASLFRCAETECIKENVSLVVRGEDAPFQHSSILLQAFTQYKSLRKFHVLHRCLKESLAQQLACSNRKIHKIKLDRNKSEFIASCDLNRSYFIMGGTGATGQLTSTFLMRYSSPHTLMSRFGRTNCMLRQHQYSDSVVSFVQSYVHTNIQINRYAVDSLCFIHAAGCTSDALLLRQTPARIREVFAPKVLTIDADLYSSKPLLSAIFFSSITARIGSPGQANYSCANSALDTLAQFEHTAGRPVCSVQWGAWGKVGMAIRNKYIERNMSRLGVGFMDPKTALAALKSTMRRIENAPLSCGAVLVVCQNAFTSDSTKADWLLEKHTTGLQSVHTRKIADKQTTLERQKKFTTSGVRCHTTQDCLSLLHKMVCTLIGFDVDPDIPLHDAGLDSLSAIELASKISTHFDRQVAPSLVFDFPTISKLCTYLMQNVEHSCDEAHGIEALCRSPQNAPFVQPNLQCVLAVSSGTSHGAAGVANCDSIALMPTARRILSDELGESDPRLKVGCFVESIVMFDWQGFRIGKAEAISMDPQQRLLLHCVSSLCLPKYTISHTSVFIGIAWMEYGEVMRTTTSVPASALDATSQALSVASGRICFTFDLTGSAMSIDTACSSSLVAVHLGVASVFQSECDSTVTGGVNLILTETTTAMFLRAGMLAPDGRCKTLDAAADGYVRAESCDTLLLSPTANVNSESVWLCGTAVNQDGRTSSLTAPNGPSQTRVIKSALANASTRPLEVRALEMHGTGTPLGDPIEVGGAMSVLGQAETLRLHAIKTNMGHAECAAGMAGLISASRAVEMQRHTGIMHMRLLNVHAWHAMSINPSQEPNVAVPRSASASCQHVHKANAKTGTSSFAFQGTNAHAILSATARNSGCSCNSVASKLFSCNQCWFASPVHSSGASIKVCHNSIVSRLHQPTPALSDHCIHGKPLFPAAGYIDYMAQACGTFDLHTAMVQDLAIVRPLLLQYHQRIEVSVRAITGAIKVETSQGEHCRARIKHASKKCDTSMKQFDSPTIAPLLRSNVHVVTHSISSYDLHHNAASLSNTSAAFIIAVNAVIGDAVSQKIAIKGLRWFASCGVSIFESVSKVKTVGSYTISGCSMSLDKLLGFDSQFKASSLTCKAPCKIQNITIFYECQDADFEPVPRKIQACSVMQVAADIALLTSLMRRHIELIHCTNATKQLHQICKVAVQENIVPSNSYVDQHKFFDKTVPSALYLRLSDEKGKKTEQLTIIGGSGGIGRLIRTKMQCIKLPNRSGKSQIYVHERTFYIECFMYVWRTHNHNCMLTDKCSSIRLVHAAGCTSDALLLRQTPARIREVFAPKVLTIDADLYSSKPLLSAIFFSSITARIGSPGQANYSCANSALDTLAQFEHTAGRPVCSVQWGAWGKVGMAIRNKYIERNMSRLGVGFMDPKTALAALKSTMRRIENAPLSCGAVLVVCQNAFTSDSTKADWLLEKHTTGLQSVHTRKIADKQTTLERQKKFTTSGVRCHTTQDCLSLLHKMVCTLIGFDVDPDIPLHDAGLDSLSAIELASKISTHFDRQVAPSLVFDFPTISKLCTYLMQNVEHSCDEAHGIEALCRSPQNAPFVQPNLQCVLAVSSGTSHGAAGVANCDSIALMPTARRILSDELGESDPRLKVGCFVESIVMFDWQGFRIGKAEAISMDPQQRLLLEHSQRLFHSHLFSIYTGISLGISSYPEVSLGAREHSCAYSASGQHISVASGRLAYIFDMQGPAVSVDTACSSALVAMYIARRETLGCRNTFDAVHDMLCGGVHIISPRNSYLCYLAGMLSAEGRCKVLDMHADGYVRGECCELQILSRCKSHTQRCVLMACTVAQDGRTSSLTAPNGIAQVILISTTAHAATVEVDHIGAIQLHGTGTILGDPIEVSSTFKALRPPMKVSHAPLMAQAVKSRSGHAEPASGCASFAHLVHSLSESAAIAIVHLRHLNAHVSDVLSLNSKIQLALFTRENMQSLSRTQAISSFAFQGTNAHAIVSVAHDEFQIRRQLACKSIMYTPIDCWGLQIMAPFRAHVTNRVLETVFLLNHVENQFLTDHQVLNRTCLPGTLLAQILRESMKNITKNQTLLLLRDVVFIKPAHFGNVQIKIWQRTGILSNAGSAINCTFSFALTSLTHTQQRVHTYTKKHCEKQSKILGRVDSQHRPSPFTMSATCDACLQICQTYSITAGYLPKAVESIRQNCMASHSMDVMDSKCMMQTASAGEVHASFILYSAGNKTSAMMTMHGCTASIIRMRHLSSLMTTERKSCGALDFVHSVYYETENSRSIHAPEWPSRPALFGVETASMMCFMQSKYVKVQSPALSSVGHSHLEAVLRCIMYEEGKQKRVTNSTFRKVKMPCQLRISVQQQFLYPKMQVATDSNQSILVEIKRSFASGSSVKSMLMNAKVAHIPFIGVVATKLSKSSLNAGDVILCTASYEQLQNSSQYIWIEMSQMHFVHYSCLLSLVRTQTEERIERERFRTMSNHHTQCSVSDEELNQNIIAFLKHLRYNLPSEHFISNRCEYWGITGGTGGIGVMNVGWLAHNHNVLGICVSCRSGKSAKPKLFNHWRISLKLRQDDSCASTTVLPYEGDTNTFGIVHMSGVTKDALHASQNPHSIRSTFAPKTGSFSCSKTHLHHAMLVSIVFSSLAVFGSIGQANYSSANATLDMMSAHKKASGMNIVSTRWGAWSAVGMAIDTRRISANTAFMPSINPHLALDILKNLYVLSSDIFSAPCYSVIGQKLHNQAHLGSGFNSHELSSKDDATIYSTKAGAEDETHDDLISLEGLIFRNLSSITGINQDEKSINTPLTSLGLDSIGMSQLAMSLAVETSLNLPHTLGFDYPTVKSLARHLADRLQSSSSSSIQSRQSLRVLEGSSAENLGNRSITLASFYGNMSTATYDDEVTLVDSRFDSFFESGNPPFAFHMNNVNNFDAHIFDLNERTTAQMDPRQRTLLKCTFGCIYDDQGVIDGQTGCFIGVSADEYGALRLIFPLNFRDVPASSVSSVASGRICFTFDLTGPAMSIDTACSSSLVAVHLGVASVFQSECDSTVTGGVNLILTETTTAMFLRAGMLAPDGRCKTLDAAADGYVRAESCDTLLLSPTANVNSESVWLCGTAVNQDGRTSSLTAPNGPSQTRVIKSALANASTRPLEVRALEMHGTGTPLGDPIEVGGAMSVLGQAETLRLHAIKTNMGHAECAAGVAGLISASRAVEMQRHTGIMHMRLLNVHAWHAMSINPSQEPNVAVPRSASASCQHVHKANAKTGTSSFAFQGTNAHAILSATVYSALYKRPMDGNPLLLDEKYLLHDYMTVECKAYYLDSSQWLTFKQRNNMDNDIARMSDLLFAVHSVVGITTNERLTMLSQVVLTTHNAVKDNLVVHLCERTSVFKVVGSNGVNTGKGCVTVTPQVRDRRFLSVCQFFRNSISTCRAMEHTLFSDTGVKEQLLKSCMHHFLRISCAMVQFSRLLNTTCAHRTVSNRKITRTKSRIQSSNNLIECEESASQIRRRAKLPTHQYVANWVYGAAKHQRIDGTDCINFGSFKASRIGKRAFNLDLCDIVPYQRVEDSSYTFASIYASMFTFLPLISIVSRSCSSTCFNLATQPRPASEAACTFGTMESLIQALHLEYPHVQVALAPKPVFEKFTFLSCSSCKMRVEAGKIFTQRLAQVSLRSTLREGRQREFAWTCSHNVLTYGGTHGITAHLINNLKRHSHCNVCIVGRTGRSRVLHVDPTFSTEDDYLTISRACVCNLDELAAIKSRFCKDQNKKLSVIHSAGVFQMTPVKHLTPAQMMAVFVPKVATSVQAKKDNTPWLFPSHSRQIDIFLSSISAVFGLGRAASYAASNAYIDELSLWFHSFGSEIISIRLGPFASVGMALNATWDSSILGLTSICPNKLCSIISKCHLTRALPGVLVVKLDMQKYDSQFRVLLNQTEHSLQQWDLLDDLLDRVKHPSTQIVSDDNYLEAMHVDVVQSHVASVVQRVLTDLRGCRNGPFSLDESVMTNGVDSTFALELADALSSKLHIDVPKLVAFEHPTLRSLIRFLSQQNQCMLSESHQNQISIQRSSCSLTTQHKRHSIDVRVYAKTFHSQSTVTHKIPLFDAIQGLEKRWIIDLFKFDTLDGALPPSFGGFIAQVYHFDANTFDMSRMEARLCDPQQRVLLGTAASLLDKKYCVNGCAKSVFVGITSSDYARILRDKSTLANGYESATNVSNVAAGRISFTFNFTGQSISIDTACSSSLVAVHFSCVCDDHYRDCEQLAFGVNLIFDPRTSIVCNAAGMLSSDGRCKAMDVEADGYGRAENYAGLLLAKRRVDHAASNDISENVGYFKASKINQDGRTSSLVAPNGNAQFELIQSCASHSGINVEGNGVDESELHGTGTQLGDPIEIAAIQRVYCVGRSPVVFQASKTLHGHSEASSGIHGLVMTLYDMRLSRFLLSLRNMNPIVLDSVKEYVNVLRFNRGRCALNPALKSISSFGYSGTNAHIVAASDEWCKHLGTTDMEFLWHRLEFNQAEDSGSPMINMRGHFLHLKGTCKIILCIHAHMHGIGAHIESYLQTLNMLGNDDRFLITKCIHRTKTCARDVWTVSLSTHDGTFNSAEACGQLAFEARLTRCASHFTRQSQSARRLCFRPSSQSLYGRTLSKSGLALPSKLFEDSKTLIHHRSREMKCITLHIELFYMERYRNEVGHWDVLVARNSSSSKFHYLEHQSVSRSHLRKRKTNHKKPDVPSEFNHNGAQLSLYEIVSACYRDVSFHSFMKDKTLIESGMDSLGITEFFARLQQQLGCRIPASLLTESLSMEELIKRLEMNQVATAVSQSEAHANVKDDSVLVSSQEQKIFVLHFKLYPSSCAYNMSMIVDISMEKDIIEVFNCMLLNHPILRMRFSPNDSVSIKSGETISSIPILRCDRKNCGSVHRRSEIVIAEAKSYPFDIFNDAPLRLYRLGESKLLVVLHHIAGDALSLAIIAHACRSNTLTCDRPGTFDSYTSWFHHLIDQKDRRAQLRNKALIHWENVLTENKRSSFNASKLRHDFMTDLNSPDILRGAGVPFKLSASATRLLKSTARILGTTTCTILLSCWLIVIATITERQVQASRLARITLGNSFDLRCASSLSQQSTIGCYAAVVPGRCVVDMNINFSHIVANVHHMINAARECPLVPINDIIHLLCTRHGCDFHANNPMFETCFSFVSNLRRSKCMESRVEHFQQAVFSLWLGLQDSHADISGTLMYDESKFCRGTVDNLIACLEHTCRSSCEEQLHSGKTLLKSLILKSSIRMERGTSLQHSHTSRLMRARLSQSIQKSRNESAQTNTNVKTIYISQPLYVTSSNVCIYLDIDQHMTTYREYIFNLIPEVRHSRLRVYAVTSNFYLRLLLHYVVASLDGVLLVHRDSDSIPDAEVLSFSPHVIFGSTTLLRKYVFTRPPTALGKNISNIRLQYSQKVPGKGLDYPCIMPVDTSPFVVHMHATGHTKLTLFSTHMHYSFIRNLQLSLSINCTDISLHFANKAGLLNITTATAVLNAKGSIVINESDSGTIHRSIARERVTILIAPESIGASMVRSEFSSSFDASSLRLLVVENLSKQRYQYLLKSLFSKFGCQIMSYDNPTYDSYNARSPTIYGSEIFYNTTSMAHELRWHTTRTQHPLCVMRAVTNNGELALLRSGFVGEIQCLLNQHECFRRTEWTDDDWFRTLDLLIIAHDGSKSVTPSRKPVDVFRLKSNSALHNSADDISSEKVQFSPNQDVRSISHSISPIEIGIVATSGNILQTSDAISCHQVSKFDVAKDLNTTLHDDGLSYNFGNHHDLRGFDSSCFRLTLQEIISMDSQQQNLLFYAQKLLSSTSSYQKTKNTSLALGISQFGDVSLSVNDQSVMGQAHSVASGRIAFFFDIHGPCVSVDTACSSSLVALHLVSTFFALTKCTFGLPAAVNHIICENVTDALYRLGMLSLEGRCKTLDISADGYVRSEYTCLLAVVDLSKSDFSPARVVQVCATQINQDGRSSALTTPNGTSQVSLLRQALRSCHKCSNSFNISMHGTGTALGDPIEINAILEAIQSAKLVNINASKSIAGHAEAASGMINLVFTIQESTNHLFSQILHLRRLNTHIVCDIDSSGSLVSLPRENVSLVENSSLRYFGTSAFAFQGTNAHTISRLLASHHYSVRWSTLQIAGRHGQLSQLSSSLRWACSMSTGKTSQSFILKIDSVLYKHHRVRNRTICPATVLYRVMFLVGHPEQHTMLYHPIRHAVQSVIISTSLYLDKPNVDLSLKLDESGYCTLSSGTSTSFTTSNTVSKGLHVCYAQISGMLRLSDYGAPSLYQSFGGVGSVGRTTSDVFCGHNRAKHEDCSLQLGFVGSIRSQDPPLHLFLPSGVTSYTHRKSEIRTRAIVSTLPSLNLNDRSDILSDHFASNKAYSTILFHIVSRRMRTDQFSNPTGMSHTKPSAFKYSIIAFQPLLLGHGLRSNIIASELRKHSTFTNVRGVSDFLQLAHALRRATKVSVHTTREMEQLDASSMMRVALSEGMISIVDSVSHPSSASVRHVIVPWESPNVNNSVVVIQNKHAYLKSITEVSRQNVQGVRNHVSGSLIRRDFDSPLKQISLYLTGGTGHIASNILQWYCSKFQVMAILHGRSGRFLHTNRSLDSAFIRVSRHGIEPNSCVDLHMYHCAGVLHDALIQFQNFFTCSKVLAPKISITSELYNKYACLDFRRLTLCSSISCLFATRGQLGYVAANAFMDSSSNMCRNVGSSIISIQWGAWSNGGMVDEVVSSRYIKSGISMLLPTDAVRLLVQNIDINCTLLLCHIGMNHFNIGYSSTCGVYFCSGNLKLTSNPGKYSKAENSSYQINSSSRVLRTRNHIEADVLKILKSVTNCQDVMDASIRWDFDSFSAIEFSEILSASFDIKLPLTLAFDFVSYVDVAHYIFDKMHDNVITMGPLQTSKISSKETIILSYVTGSYPDVQNEAADLISHVPFAKWDILVDGPKWKTSSIFGSFLFPQTSFFDFELFQISQAESRRIDVQQRLALNDTLKCVHMIDDANLSGILVAISSMDHCGLDISKTGFATDAAFSVVPGRVSFHHNLGGVSIAIDTACSSSLVAVDVARRYLRDEGNHIIVYGVNVILLQSTMSLFAVTGMLADDGRCKSLDVCADGYSRAEASHACLLHSGAKQKLPTKTSGYVCSILHSIINQDGRSSALTAPNGQAQQRALVELLHGSRAGHVECSYLHSTGTPLGDPIEIGAYLGGLVHFESHSHAVQLEAVKCRVGHGEPASGVLTLSQVAKSLISSNTGNVSLRVMNPLVEDRVCTHAAIVINRQCHQMEFLADCPKFVTTSAFAFQGTNCMIALTLGFESHNVTSVLKNLKVQWNVDIFTPHPQIQYIPAKGLIELQFKHLHSNYLLDHTVKDTCILPNTAILEIFLSAHAGLFSTCRVAGAANQLTCAPIPLSSKQRHRKIHLRIEDYKSRIVIQHTMHACAHIADVPNRAHTRCSIESKNTFAASKYVYSRTARIPRWMHIEQMFAFEPNVMDCSLQLRACTSVVDTPNVLLLPVGVKMATISNCSGNSMLSCRISLKNCGESDHCMQNATRNFTVSLSCASFRRARFDADIKLKRQAKIKVIYTNSLYRKDTMGRKDAINFSTILCTNPIQRASLKFESGVNTTQLISSSFCALQNVATHVQVAELGLSTTHTPCISSAVETVCKIACEEISTPYYIKSMGSYDITRNMGCRDHTIPQCSYIDSLGTEQTTISHKVVSVRFLEAQRVKATISSRYLPRILDSTFSTDTMQFDGGILMSGGLGALSTIIARHIYTNKPRTGELICASRSGRSARFDLNHSCPFMEISVHKIDVASWADFSATFAAPNLACEYVLHASGLLYDGLSVHQNPNKIRTVCAPKHRAAEKLQCAFSLTALRAWLVFSSTSHVLKSTGQANYAAANAMTDSFAQNQTQCGNVWKSIQWGAWDCTDGMSTPTVLQRLHDLGVGSVDEKSALCMLDKILSSKGLSIVLVNKFKELPHQRRPRARKLHEHTNLSKNERGFVERDAGKDIPVKMPMRSFEDIRLSVSAIVSSVMGMRVQDDVSLVEMGIDSIVSVDIRDQISSALNSDLPVTLVFNYPTVRDISAYLATLLSYQDSVPSLQSNLMLEAASNDDSIHSIPILSSLLPNSDNHMGTRWSTDVDHTIGKSVRCGVTIESPDRFDCSYFNVGRQEALYIDPQHRIVLMLVDNCVSVVKDMDNSWGVGVGISSAEYATLCAYSESNFLGTGTIASVASGRISYTFALSGRSVCVDTACSSALICVTMFHRTLDTHMRGCCLGGINLTLLERSSLIFEMSKMLSADGHCKTLDASADGYVRAEAGMMHILLWRHTLVSNSIILHGSAANQDGRSSSLTAPSGLAQEAVMKLATQRRDVSVETIQLHGTGTILGDPIELSATMSAYSYSSYTVALQANKSHCGHAEPASGSINILKASESVSSSKCISIRLLRCINTHISETFNQAHKNSMRSPRAIVPLLNAHFSSETHASVSAFAFQGTNAHAILQNRIKRATNLPIRWSMRLLQRDRIWITPTLPQRLHSLTVAKSTHVVMQGNIISTNNTGLFDHSVHGKAILPAASMLLLCSSAVRMFVETKIRNMCDVTIPTARVILPANGKAQINDIRIDTTSSALEMYSESILFFKCLWKCTRSTKVYQTHEYANPLVFDNNTMVCTSRSSIKIDFFHDYHSSSLDNTFQSCAALHSPKSFSSYIPTGLRELYLSNAFTDVIDRTTYVKIPLTTKISREPLSEADYSMYADNFSIGSVIKFRMKSSRIRASIHKVHKNTLWNLVRYRASKHLSDLHGHSFQYFPWASADSSCLNRTALAVISHVSARSYRIDTHIPRHTYSWSMYSSPLPKNSNIYSKMKTCEIAATYLKIEAMGISATKHLPGIGKLQNDDEVHVIPSRIPNIFICENNSYYGTSLRNGVSISGATGAIGSCLSLFLLHSDASNLSLSSRRGWSAHIAKLRVHSRFGQSIVRSFKSDRGIAREGLTSIDRNRINTFVYASGSLCDAVVLRQTPETMSTVTSAKVLGYVRDHALANIQAQRSIACSSITGFIYSFGQMNYSISNNVLDECVKLMFNSGFSSSSVQFGAWTDAVFGMARLDAHLEKRLLASINVAHGLFMLNLSMLNACTVPTYIASRLPALTSPSTPNIVSDSIQTKTSSYSFDTIADFLRHAIMSSIDMETYTYIDDAQPIMQLGLDSLALADLRSSINAKFQIDLPIISMFDYPTVHELSKAIFSFTDARTTSDSVISLDLKSKSLGLNPHEGTGSNVHKISNISLRYPNNIKNLQSLRTSLVTGAELQRRLSTRFDVELLSGSTRFAVLLRDIFYFDNTIFHLTPQETICMDPQQRHLLNCCIECLHGVSDTKIYHHMGVFIGVMWNDYQFILRSTKWAFYAYAGTGNGISFLASRPSFTFGMNGPSIAIDTACSSSMVAAHLACASMDGSHASSTLSGGTQCILIPDTFVTLSSLGAIAYDGRCKTLDAGADGYGRGEAFGLLHLEPVQPAHRYESRHDFVLSACTVNQDGRSSSFTAPNGPSQQKLIQVALLRIENASSRSCYLSLHGTGTSLGDSIELSSLMQLQSCFSFLLIGTSKSSLGHTEGSAGVVGILDSIVCSTHAVNFGMRLCRNLNPHLSVFTHVASEGNVHIARAMTTAPQIELTASSSFGMSGVNAHTIIRAIPSKLTHRCCSTRARLLCSQMFHAGVGTLYSNVQLISVFKSASRAVFTVNICRPAWSSLHDHSVNHTPVLPAAASLIIPIIPLDDLLIDSVLQMKTILLIPIVLKQLDTISVVTYRDSTMRLMLRSGESATTSKFRKTNDGSNIREPFQQLGHCIRSRRGALKTKMSKYVGSACATVGAAHLIDCSMHILYCLMDKENNDVVHVPAVIHIFQLQQLPLEHQFESSSSAKKKDAPESNHTTSNLALLRRLQCKPLSTMNRAFERENLNKKVQSSVLYALMWCAVHHIKHVCPQTPHSYNLGRSMDTNTSTSYRYAPSYAAMMQNVHASIRLVGLATSSTPVGRAGENMSNVISASVIHTISMVSVADLNQTYHLDVHSDSPLSLKRASSHFKKAECESRAEPIQSQYLARARYVPMIHGCRKVPLNNFVLQPSPRGAIKDLTPVPSIALDSGITVSKPFVRTRILAVGLNFRDVLNILDMYPGVTEPPGTDFSGIIDDVYSHSHGDAIFGLTTGCLGDVAYVHRSLFSIKPPRVNFIEASAIPTVFLTVDECFSSIRRLKTTPAHLLVHGTTGGVGLAIKSICSMMGDSLSGTSSNVKKRHLMRYLGIPCMSNSRSTKFSQSVFLSSLSRSCPVDVVLNTLTSPGMIAASLSILNVHATFLELSKRGIWSADAFEKENYKATYEVKAIDHQSIAELSFRLSLLGLFMCAGLIQPSICLSNEFRFIRQSMREMTRASHIGKVVVYHKTVMSGHQLVTGGTGAIGILLTRWLLGIGANSVILLSRNGHNNGIMRLPRDSRLHFTLENADISCSEFSTIFRSLSLSDSVGIFHTSGVLRDALICDQTSAHLAEVSAPKVSGVKRLHSALKDAYLVKTFLNFSSLAATIASIGQSNYTYANSWLDQWSSTCKERGMVNESIQWGAWLAGDGMANSDGISRRMERVGLQYIQPSVAMSIIQTRLDHSILHHNFTLLSQQLIATGLNWSRFMSFAVKNRFLYGKKQNFNQAGNVDSKNTASAKDTEVLVVQKLLQIFKEVSGHELTADSAIMEAGVDSLGAVESRNAIADAFTITDLPSTLIFDYPTVKSIAGLILGAENEIKRTETELPIDSPTRSIEVRISSVSSPGQYQHALDDVSGVPENRWDIRADDYALIRFGRFLHNIEYFDIALFSMRRAEATAVDPQQRILLARALDGRAHAVNGQYSEGCGVVVGISSTDYSAITSRAGKLQATGGSLSVACGRISFTYNLRGTCASIDTACSSSLVGSHVARNAVLTGECDSMICCGVNITLNPTTTIVFRTAGMLADDGRCKTLDMAANGYVRGEGSTLLLLTPHSDGVRDDYCMFYASASSVNQDGRSSSLTAPHGPSQQSVILHTMLQSGNDNSSSGGIELHGTGTSLGDPIEVGAARTVLSSLKRLPVVTFSAMKTRCGHTEPASGGMGLCGIVDCIFRLNTPALVHLCQLSTHIQSILNQDTAERCGIALPRQATQSAWQCDAHAVNRGVSAFAFQGTNAHVSVRRDYVMKSLPDASVMQHSIECWISHAAFGLRLVHAVETSECLRIQLPPLKTRHIDRDHCVRGRLVLPATSFLELTLTCVKQLHTMTVNVVRRTQIHAACLLDTWRNDALSFKISQTTGSISVSSQRAGHTSCKVVQTMLTQRTPSPKVYYANVSKSSLDLHFKVHSKKVQTLDQSFAAELDAHVQSLSALRLNTFSDDSFELHLPVSLEICTHQTSLARSRDHALSRFSPQKMQSDHIAQQATENQLAMHELLGKKVASHSEPAAMGSERYYGGRQGRHAIDMIYRATWKTENTYRGPLLRTEGVTNVYSHLAAGRQSASRVASLAVQSLHASSNLCVIRTTATELVSACPRLCADTQSSIGRCIPVAGAMWGIFRSGAHEMSQRLVCVDLGASSIVHAKATDFLHSNSDSNEVHAKSISNRHVRTPTLSKVCPNLHAKMLWRDPRRAMAKHIAQCDSNALLHPCSDIYTGGVGGIGALIYEWNASICDRPFVLVGRSGRGKHIAPAKFTSLLTIQRVNLCVRSETERLVSCSVRNVGRVLHMSGVLKDSILMKQTFSTVSIAFANKTQGAQAVCHENLPQMSLTHVFFSSIAALLGSPGQTNYAGANALLDTLAQLGTTMGWRCMSLQWGPWGGSYGMAVRSAVGTPRNFGSLGIEVIDPHTALRTLRTLIQPPNMFSIYAVCPLRATGLHAWSVSTSHSAVSPPNAPYVDQNSTQLKIKISAGERGVPSCVIHGDEIAGRVASIVNDAVGRPLDAKEPLLDAGLDSLGAVELRSRLNDEFAVQLPSTVVFDHPSVYALAEAVAGELSHGKSNYGSAQVLRNSTIDVTYSAQVCISSVSSPGQYQHALDDVSGVPENRWDIRADDYALIRFGRFLHNIEYFDIALFSMRRAEATAVDPQQRILLARALDGRAHAVNGQYSEGCGVVVGISSTDYSAITSRAGKLQATGGSLSVACGRISFTYNLRGTCASIDTACSSSLVGSHVARNAVLTGECDSMICCGVNITLNPTTTIVFRTAGMLADDGRCKTLDMAANGYVRGEGSTLLLLTPHSDGVRDDYCMFYASASSVNQDGRSSSLTAPHGPSQQSVILHTMLQSGNDNSSSGGIELHGTGTSLGDPIEVGAARTVLSSLKRLPVVTFSAMKTRCGHTEPASGGMGLCGIVDCIFRLNTPALVHLCQLSTHIQSILNQDTAERCGIALPRQATQSAWQCDAHAVNRGVSAFAFQGTNAHVSVRRDYVMKYLPDASVMQHSIECWISHAAFGLRLVHAVETSECLRIQLPPLKTRHIDRDHCVRGRLVLPATSFLELTLTCVKQLHTMTVNVVRRTQIHAACLLDTWRNDALSFKISQTTGSISVSSQRAGHTSCKVVQTMLTQRTPSPKVYYANVSKSSLDLHFKVHSKKVQTLDQSFAAELDAHVQSLSALRLNTFSDDSFELHLPVSLEICTHQTSLARSRDHALSRFSPQKMQSDHIAQQATENQLAMHELLGKKVASHSEPAAMGSERYYGGRQGRHAIDMIYRATWKTENTYRGPLLRTEGVTNVYSHLAAGRQSASRVASLAVQSLHASSNLCVIRTTATELVSACPRLCADTQSSIGRCIPVAGAMWGIFRSGAHEMSQRLVCVDLGASSIVHAKATDFLHSNSDSNEVHAKSISNRHVRTPTLSKVCPNLHAKMLWRDPRRAMAKHIAQCDSNALLHPCSDIYTGGVGGIGALIYEWNASICDRPFVLVGRSGRGKHIAPAKFTSLLTIQRVNLCVRSETERLVSCSVRNVGRVLHMSGVLKDSILMKQTFSTVSIAFANKTQGAQAVCHENLPQMSLTHVFFSSIAALLGSPGQTNYAGANALLDTLAQLGTTMGWRCMSLQWGPWGGSYGMAVRSAVGTPRNFGSLGIEVIDPHTALRTLRTLIQPPNMFSIYAVCPLRATGLHAWSVPTSHSAVSPPNAPYVDQNSTQLKIKISAGERGVPSCVIHGDEIAGRVASIVNDAVGRPLDAKEPLLDAGLDSLGAVELRSRLNDEFAVQLPSTVVFDHPSVYALAEAVAGELSHGKSNYGSAQVLRNSTIDVTYSAQVCISSVSSPGQYQHALDDVSGVPENRWDIRADDYALIRFGRFLHNIEYFDIALFSMRRAEATAVDPQQRILLARALDGRAHAVNGQYSEGCGVVVGISSTDYSAITSRAGKLQATGGSLSVACGRISFTYNLRGTCASIDTACSSSLVGSHVARNAVLTGECDSMICCGVNITLNPTTTIVFRTAGMLADDGRCKTLDMAANGYVRGEGSTLLLLTPHSDGVRDDYCMFYASASSVNQDGRSSSLTAPHGPSQQSVILHTMLQSGNDNSSSGGIELHGTGTSLGDPIEVGAARTVLSSLKRLPVVTFSAMKTRCGHTEPASGGMGLCGIVDCIFRLNTPALVHLCQLSTHIQSILNQDTAERCGIALPRQATQSAWQCDAHAVNRGVSAFAFQGTNAHVSVRRDYVMKYLPDASVMQHSIECWISQLSSRATVALSTLTMACVSIRFNATVNALTSSPLQVASDATCLILDDRTTELSLKNVVLSTVYASKVLDAYLKSNKVLVYGSGYKVIDAQSNAIASTHATVRAGEHGVGLNANTVAAYADAEQGFVKFREMHGGLSSADIHVESNEYHEKPQHRLRCTLLDTFTGGNSVAYVRTVELYRRSCTVQYAQHDTLMCCIILSDHRFKYNYSRQNWSTFTPEVFLHISTDSVLCTSTSPSSSRSSVPNVEYLYALRWEASPLRVNVAPNGDTCATTTVRHTLCNYRRSVHRCGSLPTVVNILHSICALTTSSESKHLCVLSKSAPVTKRIFPSPISSIHKHISDLTLSTLPRVFCVENKNTTYAVCTGDSARIHPSGISNTTARLRHVSAVGHLAFTPNLCSTHSSPANMRRNNQCKNNQTEVHGAGEIGKLVYITALLNGQRLIRLTNRSGRCSYSVVVWNGSSSHSVTVDSVDNCHYSDNTWHNSRVQVNRSFFASGVLRDAIATKQTAYTIRVVVSPKLIGSLASIRDPTSLSVQTDYYSSISVLLGTFGQVNYVAANSSLDAHCNYAHHQGLDKVSVQWGAWVNLTGMMKQSALQLDSLTRFGIGSVPTKVGIHILSILNSVMIQDATIVANMFLWDKLSIPLLSQGVSTDSKRTLLCTDRTHPSTLSETQSLVSDHVRRVLGHTIDANMPFIDAGLDSMYLTELSRSIEICFDVPLPSTVAFDHPTITSLSKFIHKTTLRQKIDDCKPSAKEPMRIVVQDGIISSVACIAVHTGDADCKHIMHPVQFCGAIANGIDAIRKIPIDRWDVERIFSFTGISRKRDFVYHEYSRHGSFLRQLDVFDSNFFGIGRSDVRSLLEPQQRELLKACHEVTDVPYSDKSTRVYEQKISVYVGICTNDSDSVARDEAFRVMFTDSGCSAHDKLSNIAHGMSESTYAFASNRISHTFGFQGESISIDCASASGLVCIHLATSSSKVNVPSDPEYANSSIAASSNIILHRQLSDLHIARQMFPADGRCKTFDAQADGFERGEGVGAVMICTYKATSSKFMLVTLLGSSCIHKGGGASLRALRGPAIEYKVHRALLDANILPADVAFVEASGLGEPLGDAIEIGAYQRIFCFEDPSRTSNIGFGSLHTNLGHLDGASGMISLIKSALMSHALLTSPLVHFRKLNNLLLGQHACTTAEKMGHTWRDVNLDKRSHFPMLKGPTSGGIIGTSSFGYGGSMAHVLTNVRRDCRAFQEPRHRQNVLLTRCNAANQNTHVDANRLTFQLQKCIWNELHSSLSRNEPCRRRHPLSMSEPLHNVLRDIGFSHCGSGEFRENTIKGIAASVDAAIKVVTRETFSVGLSAGERICLWIESQVKKYTPLTDSNSWMPRLRLHEPKVKGKILFVLSSPRSGSTLLQMILNSHPSIFAPQELYLLNFETMYQRFESISRGHSWAFEGLRKAIVELRGCFADEADKIMHDMHSMSTKNVYEVLQNWCGDRILVDKSPPYSWSLDTLERAESIFEDVYYIFIHRHPYATIHSMSKETFKSRHDILENEKLLQLNGRKRLELLSASTIEQIWSHMDKLWARGNSNIIDFLRNVESTRQLEICYEDLVSDPTSHIDKICDFLKLPSCTNMTNPYSYNNAKMFEPIEPGGKGAADPNILSHCFINPTLANAWKDAASPGNLSEQSQRIAATLRYRLPQWKHRNSPVSRSFITRLNGNTTTPIVVFLNDVDCGTSFYSSLASSIKSAAFVVTTDWQSSTAASVSELAAMYVQRIRAYLDINNGDEVILVTRGLGVYIAREFVRLCETKQHVCADPSWREQASDAIQSNPKILGLVTLFTKEYEVLVSQQNNSDVGKILSYAALLASSYPEVKNESASVNASLRRVFIESNPNSVNECPNETLSILCCTQLLYSSRDPLFRVNPDFMSDIPICVISELEGISNELSLCFGIEHKYLDLRIEEKIDESALSDAINLLSKMTPK

SEQ ID NO: 19 - protein, 1007 aa, Unknown
  Description of Unknown: Bacterium Ellin514 polypeptide
MDHSLDVFPIEDLGIPADARVKLNSELSRPEDSAGLSCKGGFKLEKNSSAEAGALCIQEMFEKQAALTPEAVAVVCQCRCLTYRELNARANQVAANLRQLNVGPEVMVGICMERSWELLVGILGILKAGGAYLPLDPSYPGSRLSLMLEDAQPLVVLTQAKLCRTLPAIGTRTICLDALPTIDEVENPSLLNFPGNVAYVLYTSGSTGRPKGVLIEHRSVVNLLGWAHELYTREELAGVLASTSVCFDLSVFEFFVPLSCGGRVILAENALELPQLPAAGEVTLLNTVPSAMAELLRTRGLPASVRVVNLAGEPLSAQLVDELYRTQPCVRKVYDLYGPTEDTVYTTCALRRPGAPATIGRPLANKQVYILNEQQEPVPVGVPGELFIGGSGLARGYLHQAQLTSEKFIPHPFSADPSARLYRTGDLATYLPDGNIEFIGRVDLQVKIRGHRVELGEIESALNQHPAIRENAVVLRNEADQKRLVGYAVARSKEHPTASELRRFLQGKLPDYMVPSTFVWLSAMPLTVNGKLDRRALPAPNCLRPELDQAYVAPKTELEKFLAGIWCNLLQLDRIGINDKFFELGGDSLQGAEFIAQVEKKLGEQIYVVVLFEAPTIARFTEYLEMHYATAVSRAFGVTHDGSPRELAGGKVNASKLVLARSLIKPLPPRSSGMESRGKAPALFILAPPRSGTSLLRVMLAGNPELFTTSELHLLNFNTLGERKAFFSGKYSLWLEGLIRTVMEIKQCSPEEAAQIIEAYEFQDLSTADMYALLQDWIGGRMLVEKTPAYGLDMEILKRAESDFENALYIHLVRHPAAMVHSFEKNHLDQVYFNYEHCFTAREVGELYWLIVNQNALEFLKNIPSRRQMQMRFEDLVADPSGIMQQMCQNFGMKFHPDMIQPYKDPDKKMLDGVHRQSKSMTDAKLFDYKSIEAKVAQQSVKTDATFLSDLTRELGNRFGYNLDDRAEVAVKEKCGNAANRGHHLIGEQRRLRQAFRERLINQQEIK

SEQ ID NO: 20 - protein, 2720 aa, Synechococcus sp.; identical to SEQ ID NO: 4

SEQ ID NO: 21 - protein, 109 aa, Synechococcus sp.
  MOD_RES (2)..(2): Any amino acid
  MOD_RES (46)..(47): Any amino acid
  MOD_RES (80)..(80): Any amino acid
MXERFVTVRGLETCLCEWGDRHQPLVLLLHGILEQGASWQLIAPQXXAQGYWVVAPDLRGHGKSAHAQSYSMLDFLADVXALAKQLGDRPFTLWATPWVPSSVPCMQEF

SEQ ID NO: 22 - protein, 281 aa, Hahella chejuensis
MDELTLQLPHLKLAALRWGEGRPNKILALHGWLDNAASFSFLGPRLAAAGYEVVAVDLPGHGYSQHRPHGASYHLLDYLHDVDQALLALGWNRPILLGHSLGAVISSLYAAAAQDRIARLILVEALGPVAAASVDIAANLSKALVKTRTKSGQKKVYYTIEKLVEDRQRGFGGLSAEASRILVERNIQPVKDGWVWRTDARLRWPSYLRFSEEQVRAYLRSISTPTLLVAGDKGFISLDSERNGRVEALAAARKETLRGGHHLHMDGDVDGLAKIIEEFLR

SEQ ID NO: 23 - protein, 309 aa, Methylobacterium sp.
MCHASPARQPLRDTESEPAMRPYEPRRPSAGRRVALRGLRLHLREWGAPEAPPLVLLHGSRDASATFQFVVDALAGSWRVIALDWRGHGLSDWAPGGYWWQDYLADLDALLDTLGFAGPVPLAGHSLGGNMALLYAGLRPARIARVISLDGFGLPDRDPAQAPAHLRRWLDSVSGPAPSPVYPSLPALCARLTAANPALDTARALFLGGHLGRERPEGGWTWAFDPAHRRPFATLHRFAETASCWRRIAAPTLFLGSGQPFPPALAGEIEARAALVPGARLLRLPGTGHNLHHDAPEQVAAAIEAFLTG

SEQ ID NO: 24 - protein, 289 aa, Haliangium ochraceum
MPPSTRHLQLFNGLDYHVLEWAPDDPACDHTVVLVHGYLDLAWGWRPVVDAGLAGRFHIVAPDMRGHGDSGRIGAGGYYHFMDYLADLDDLVGKLGRARVSLVGHSMGGTITGMYAGAFPQLVHRLALLEGMGPPVPSTPAPERVAGWIKSWRTALAAPPRSYADRAQAAARLQSHDPKLDDELAAELAELGTLEGPEGVHFKHDPLHLTRGPYPFRLEFAQELWRNITCPTLLIDAADSHFARIFADIEERYACVPHAERHTIADAGHMMHRHQPKALAERLIAFLES

SEQ ID NO: 25 - protein, 310 aa, Limnobacter sp.
MNSYIPIKTHESHFLDLRGLRTHLHCWGSVDAPLLVMVHGWMDVGASYQFVVDALKKDYRVIAPDWRGFGLSDWPVADGSPGIRSYWFPDYLADLDALLDHFSPTQPVNLVGHSMGGNIAMMYAGVRPKRIRSVVNLEGFGMLDSPPEKAPKRYSNWLDEIKTPKELRTYNSLEAVAKRLQKTNHRLSDEKAMYLAQFWSRVENDGYSLLGDAAHKIMNPIGYRLAEAQACWSNIESPVLHVEAKQTEAGMWLSRAGEPVDFDAFRTRFHCVPNWKHVVVDNAGHMVHHDQPEVLAQLIEAHIGQAANPE

SEQ ID NO: 26 - protein, 300 aa, Azoarcus sp.
MLRCVCYHPRMKPCRSRFVDVRGLRYHLREWGTPGAPRVFMLHGWMDVSASFQFVVDAFERDWHVIAPDWRGFGASARGGDTYWFPDYLADLDALLRMEEPDRPARLVGHSMGGNVACLYAGVRPARVDRLVALDAFGLADHAADEAPGRYEKWLAQLERASGFRDYPDFEALAERLRAENPRLAPERAAWLARQLGEGAADGSVRWAADPAHRRISPVLYRRGESEACWRRATAPVMWIEPADAALRHRVGVSDDIHASAQACFRDFRLVRIGDAGHNLHHDQPGQVAAAIEAFLVQSE

SEQ ID NO: 27 - protein, 292 aa, Aromatoleum aromaticum
MKPNPESRCEQLDVRGLRYNVRHWGAADAPPVFFLHGWMDNSATFQFVVGALAQDWHVIAPDWRGYGASEWLRRPYWFPDYYADLDALLAHYSPHRPARLVGHSMGGNIAGVYSGARPQRVSQVAILDVLGLKDGSADDAPKRLDQWLDAVLADPQLRRYADHDALARRLQQANPRLTEDRAAFLARNVSRVLPDGQVEMACDPWHKTAAPAPYRLDDTLACWRAITAPVLLLVSEEGYVVDRFPADSDDYRQRLACFTDLRVATVAGAGHNLQHDQPEQVAAALENFLLRD

SEQ ID NO: 28 - protein, 300 aa, Herbaspirillum seropedicae
MRPTVAKTASRSEFLTIRGLRYHVRHWGDPEAPKIFMLHGWMDMSASFQFMVDALQGQWHVIAPDWRGFGLTERSQADSYWFPDYLADLDAIIDHYAGSEAINLLGHSMGGNVVTLYAGVRPQRIKRLINLEGLGLPATQPEQAPGRFAQWMDEVRNRPVLRGYATLEEVAQRLQRNNARLSDERAAFLAQHWAQQDDSGLWQILGDPAHKQVSPILYRADEMMACWRRITAPVLWIEAIDSDIWRFFGPASLKREEIDRRIACIPRVQVEMIADAGHMLHHDQPEQLAQLIEAFLQQPV

SEQ ID NO: 29 - protein, 293 aa, Unknown
  Description of Unknown: Uncultured microorganism putative esterase polypeptide
  MOD_RES (212)..(212): Any amino acid
MSNPVSRRIALSTGLRYHVLEWGADNPALDHPVVLVHGFLDLAWTWEAVAQSDLAQHFHLIAPDLRGHGDSDRVGPGGYYHFMDYLADLEDVIAQLGRSRVSIVGHSMGGLVAAYYTGVYPSRVSKLALLEGLGPPDSDWSAWPDRLSAWIAAWKRQRERGGSKRYLSIEEAAARLRATDPKLSVPMSQRLAEVSTVRTDDGRLIFKHDPLXLTPAPYLFMVDGARSLWQRITCPTLLVDGKDTEFRYSPEEAQRRQSVFPNARHVELPDAGHMMQRHQPEQLAAILDEFLRT

SEQ ID NO: 30 - protein, 315 aa, Pseudoalteromonas atlantica
MQAKSTLHKSTQEKSTTAVRSQELSSQQLSTLEANVSDVEFPLRNITLRGLASGDPSKPLIVALHGWLDNAATFKPLAEYLSDYYVIALDFAGHGKSDHRSKDAHYHLVDFVYDVHEVVETQGWDNFILLGHSMGGIVGSMYTSCFPERVSKYITIESLGPVTKDSESSPEQLRESIESRLKGAASEGKHPSNKQSVIRARAIAGGFSDECARLLVERNLCEVEGKLEFTTDRRLRTFSSLRLTEGQAQAFLKAITCPTIVIIADNGYEIMKKTAELRINLLKDAKLLSVVGSHHPHLDNTQSVSEHILHFLREN

SEQ ID NO: 31 - protein, 282 aa, Stigmatella aurantiaca
MPPSFEPHSISAHGLALHVRQRHPAGTRAVLFLHGWLDHSRSFDWVLEHLPDTWRLILLDFRGMGRSEHVPPGGSYSFSDYLLDVECTLDGLGLETVHLVGHSLGGVVGAAYAAARPQRIQSLTLIESLGPLGGPPEAALERLRGFLDDARRPPHRKRYASVEEAAARLRENNPSLTEAASLHLARYGTEPLEGGVVFRFDPLHRRRFGLGFDEAQWLAILGALSCPVQVLHGSHGLSFEDAQTRARLAALRSPLPLTLSGGHHVHMEQPEAVARALEHFIR

SEQ ID NO: 32 - protein, 284 aa, Myxococcus xanthus
MSDALESLSVDAEGLALNVRQRPAPDAPAVLFLHGWLDHSHSFDALIPHLPQTWRLVLLDFRGMGRSAHVGPGATYQFSDYALDVEATLDGLGLDAVHLVGHSLGGIVSQAYAAARPGRVKSVTLIESLGPAGGPAEGALGRLRSALDDARRPPNRKRYPTVEAAAARLLENSPTLTQDAALYLARHGTEPYEGGFAFTFDPRHRRRFGMGYDEAQWMALQAGVTCPLQLILATGGLRHDEALMRNRTQALQTLAHPPLHLPGGHHVHMEQPKMVAEALIRLIR

SEQ ID NO: 33 - protein, 290 aa, Unknown
  Description of Unknown: Marine gamma proteobacterium alpha/beta hydrolase polypeptide
MEVFSGPTSHSYFSQRLRLHYVDWGNPEAPPLLLVHGGRDHCRNWDWIARELRKDYHVIAPDLRGHGDSEWIRGGTYNTMDYVYDIAQLIHQLKLAPLKIISHSMGGGVSLRYSGIFPENVEKLVAIEGVGPSPKIIAERKVYEVDRAMRGWVKQMRKFSGHQLRRYPSIEEAAARMKEANPHLSLDQAHHLTVHGVNQNEDGTFCWKFDNYVRSYPSTGMNMEDSVALLSKIDCPTMLVRGAESNAPDPKQDGRAELFKNVRIETVENAGHWVHHDQLKIFMGLLKDFL

SEQ ID NO: 34 - protein, 288 aa, Janthinobacterium sp.
MKPSRSEWITIRGLQYHIRHWGEPDAPVLFMLHGWMDVSASFQFLVDALKDDWHVIAPDWRGFGLTEHADGNYWFPDYLADLDAILLHYSPTRPVNLLGHSLGANVAGIYAGVRPGRIARLIMLEGFGMPATQAQDAPARFGNWLDELREPPVLRSYGSPAEVARRLQKNNPRLNNERAAFLSVHWAAPDKDGRWELQADPAHRLSNPYLYRIEEVLACWRAISAPVLWVEGRQSELLARFGADPRAEIDKRIACIADATILLLDDAGHMLQHDQPEMIAVAIEEFLD

SEQ ID NO: 35 - protein, 290 aa, Oceanobacter sp.
MSIEARNINIKNLNIALQCYGDESKPALLMLHGWLDNSASFSLLAPLMADEYYVVAVDLPGHGQSDHWPQGQHYHLWEAVEHIELIADALKLKSFYLLGHSMGAAMSTLYAGTFSQRIDGLVLIEAFGPMAGDISGAPERLATAISQMKRYEELSIQRPKRDQKAFAQARMQGPMALTQQAADIIVSRGTKETPEGIVWSHDKRLQVTSMMRMSEELIQQFILNIKSPVLGIFASDGLFNQSQIDLRWSALRSEKEMHWFSGGHHLHLEGNVEQVADTIKQFLYNKKQNL

SEQ ID NO: 36 - protein, 290 aa, Herminiimonas arsenicoxydans
MKSSHSEFISLRGMHYHIRHWGDQRAPMLFMLHGWMDVSASFQFLVDALQRDWHVIAPDWRGFGLSARTAAPYWFPDYLADLDAILRHYAPEQAVNLLGHSLGANVAGIYAGVRASRIKKLVMLEGFGMSVTQPDEAPVRYASWLDQVQGTPRLHSYATVNGVAARLQKNNPRLSDERAAFLASHWAAQNEGGSWDILADPWHKLPNPNLYRVDEVMACWQAITAPTLWIEASDSELLRRMGSGESARAEIARRIAYLRNATILTVQDAGHMVQHDQPEIVAEAIEKFLD

SEQ ID NO: 37 - protein, 309 aa, Ralstonia sp.
MTETMDSTTQPAARQASRSTYLPVRGLRYHIREWGEPGAPILFLFHGWMDVSASFQFLVDALRERWHIVAPDWRGYGQTARPTDAPGVESYWFADYVADLEAIIDHYQPEGQVTLVGHSLGANVVCLYAGIRPERVRRVVDLEGFGMSASKASQAPRRYARWLDELKDKPRLNTYATVEDVAARLQKTNPRLPADKAAFLAQHWSSQNADGRWEILGDPAHKIINPQLYRLDEVMEIWRRVTAPVLHVEAVDSPTLKAIAGDVPLAEFKTRFAAFPDFREVLIADAGHMLHHDQPEQVAALIEEFCLQR

SEQ ID NO: 38 - protein, 305 aa, Ralstonia pickettii
MDSTTQPAARQASRSTYLPVRGLRYHIREWGEPGAPILFLFHGWMDVSASFQFLVDALRERWHIVAPDWRGYGQTARPTDAPGVESYWFADYVADLEAIIDHYQPEGQVTLVGHSLGANVVCLYAGIRPERVRRVVDLEGFGMSASKASQAPRRYARWLDELKDKPRLNTYATVEDVAARLQKTNPRLPADKAAFLAQHWSSRNADGRWEILGDPAHKIIDPQLYRLDEVMEIWRRVTAPVLHVEAVDSPTLKAIAGDVPLAEFKTRFAAFPDFREVLIADAGHMLHHDQPEQVAALIEEFCLQR

SEQ ID NO: 39 - protein, 305 aa, Ralstonia pickettii
MNSTTQPAVRLASRSTYLPVRGLRYHIREWGEPGAPILFLFHGWMDVSASFQFLVDALRQRWHIVAPDWRGYGQTARPTDAPGVESYWFADYVADLEAIIDHYQPEGQVTLVGHSLGANVVCLYAGIRPERVRRVVDLEGFGMSASKASQAPRRYARWLDELKDKPRLNTYATVEDVAARLQKTNPRLPADKAAFLAQHWSSQNADGRWEILGDPAHKIINPQLYRLDEVMEIWRRVTAPVLHVEAVDSPTLKAIAGDVPLAEFKTRFTAFPDFREVLIADAGHMLHHDQPEQVAALIEEFCLQR

SEQ ID NO: 40 - protein, 285 aa, Pseudomonas stutzeri
MSMLFEEVRLSLPHLEVAAHLYGPEDGKPVIALHGWLDNAATFSRLAPRLQGLRIVALDLPGHGHSDHRPAGAGYNIWDYAHDVLQVAEQFGWQRFSLLGHSMGAIVSVLLAGALPARIERLALIDGAIPYTGEADGAPQKLGAALEALLAVDDKRKPVYSTFDKAVQARMKGVGAVSREAAERLAQRGLMPVPGGYTWRTDARLMLPSAMRLTRAHALAFVRQVACPSSLVLAEQGLMIQPELRELVDGLPFAVQRLPGGHHLHLDDEPGAEAVAAVFNAFFHG

SEQ ID NO: 41 - protein, 300 aa, Thauera sp.
MPARMHYTVLEPSSTERVAIRGLEYNVRRWGPADAPKVFLLHGWMDTSATFQFVVDALRHDWQLIAPDWRGYGETTWLHRPYWFPDYYADLEALLAHYAPAGPVRLVGHSMGANIAGIYAGLRPQRVARLAMLDFIGLKAPADVDAPQQLGRWLDAQLAPPPARIYADRAALAERLRAVNPRLTPARAEFLCRHLGRVRADGQVEIAGDPWHKIPSPAVYRIEDAMACWRRVRAPVLMLVSAEGYVHDRFGDEPEELQRRIDCFADARVVTVADCGHNLQHDQPEVVAAELEAFLDREIP

SEQ ID NO: 42 - protein, 291 aa, Alcanivorax sp.
MDAIERKFSVYGQTLSALEWPGRDDGGTAEPVLALHGWLDNAASFSPLSTYLKRPLLALDVSGHGHSDHRPDGVVTHLVDHVRDVLAVVDQLGWERFTLMGHSMGAGIACLFAAACPERVSRLVLIEGLGPPSTDGKDVATNLRKALDDSASLAGKRKPVYARVDDAIEARTKGFGGLNHEASALLSERGLMPVEGGWTWRADSRLRLTSFLRLTEEQVEGFIRAIKAPTCLIIGEQGMGGNGMFDHRLGWLEGASIVRLPGRHHLHMEAPESVAASINDFLCATDAIIED

SEQ ID NO: 43 - protein, 312 aa, Methylibium petroleiphilum
MTSPSSSTAPGLRPSRVLHVPVRGLHYQVHAWGDASLVAPDRPPLMLLHGWMDVGASFQFLVDALATPRLVLAPDWRGFGGSVAPPGTDSYWFADYLADLDALLDHFAPDQPVDLLGHSMGGNIVMLYAGVRPARIRRLINLEGFGMPRSAPAQAPGRYAKWLDELKAPQSLRDYASLDEVAHRLRQNNPRLTAERASWLAPHWARQTAAGRWEIQGDPAHKRSNPLLYRVDEVLACWARITAPLLWVEGRQTDVSKWWGNSYPRSDFEERLASIASTVSIERVMLEDAGHMLHHDQPEHLSEHIERFLSGP

SEQ ID NO: 44 - protein, 284 aa, Stenotrophomonas maltophilia
MSLQPFELEVGGARVAGLRNHGDGPRVLALHGWLDNATSFMPLAPHLSSLQLVAIDLPGHGHSAHLPAGASYTTAAAICHVLDVADALGWDRFTLLGHSMGAGIASLTASVSDRIERLVAIEALGGLRGPEEETANRLREHVNATRGLARKQLRVFPDLAAPIRARMMTNQLSEGCARLLVERGVEPVEGGYRWCSDPRLMLPTAIRLSEGQIDNLLQAIACPTQVIYATPAQSYYPEPMRSDRLRHLRDGRLAVFPGNHHLHMEDPARIAEVILRFFNNDNAG

SEQ ID NO: 45 - protein, 259 aa, Nitrococcus mobilis
MLLLHGWMDTGTTFRLLAHALGAECHCLAPDWRGFGRSDRAPGGYWFADYLADLEALLDELAPDQAVTLVGHSMGGNVAGLYAGVRPQRVRRLVSIEGFGLAASDPREAPERYARWLESLRWPPRPRRFNDYAALAEHLLRRQPGLTRERAEALAHDWAYRSVDGVYLRGDSAHKRPNPVLYRLEEAMACWRRITAPVLWVYGANSAYVARLRALGDWAERTGCFRDFREASIPEAGHAVHYEQPQALARLIGPFLSAP

SEQ ID NO: 46 - protein, 284 aa, Stenotrophomonas maltophilia
MSLQPFELEVGGARVAGLRNHGDGPRVLALHGWLDNAASFVPLAPHLSSLQLVAIDLPGHGHSAHLPAGTSYTTAAAICHVLDVADALGWDRFNLLGHSMGAGIASLTASVSDRVERLVAIEALGGLRGPEEETANRLREHVNATRALARKQLRVFPDLAAPIRARMMTNQLSEHCARLLVERGVEPVEGGYRWCSDPRLMLPTAIRLSEGQIDNLLQAIACPTQVIYATPAQSYYPEPMRSDRLQHLRDGRLAVFPGNHHLHMEDPEQIAGVILRFFSNDNAG

SEQ ID NO: 47 - protein, 289 aa, Dechloromonas aromatica
MSPTSTTEHIDIRGLRYHVRHWGAVDAPKIFLLHGWMDSSATFQFVVDAFEKSWHVIAPDWRGYGDSEWLGRPYWFPDYYADLEALLQHYSPDEPAQLVGHSMGANIAATFAALRPHRVARLAMLDFLGLKPEPSIDAPTQIGKWLDEIADQPRLRVYPDHAALARRLRFANPRLTAERAEFLSRAVSRTTADGSVEMACDPWHKVASPALYRVEDAMAAWRKITCPVLMLIADKGFVRMRFGRDTPEFQQRIESFADVQAKDIPEAGHNLQHDQPELVAAELEGFLQR

SEQ ID NO: 48 - protein, 289 aa, Rhodopseudomonas palustris
MQQPQSRFFQSHGLRLHCWDWGNAAAPPLLLIHGGKDHGRSWDVFARALQPHFHVIAPDLRGHGDSDWARGGSYALPEYVYDLTRLPPLADAQPATVIGHSMGGMIAMLYAGTFPEKVKRLVVLDGVTVRPDAKMAPVHERMIKWLGQLDRLEGREPRHYPTIANAAAQMRAHNKRLTPDLALHLATHGARRNDDGSYSWKFDPYQRVTAPHRLAPQEYAELWGRITCPTLLLFAGESFIDPARAAEASRYFADVRAEIVADAGHWLQHDRPEEVLRLISGFVELPSRS

SEQ ID NO: 49 - protein, 292 aa, Paracoccus denitrificans
MPDFTLSTVRRLRVRDLDICLREWGASDAPPLVLLHGIRDNSITFQFLVDELEQDWHIFAPDLRGHGQTGRAGILWQQDLLADCSALLSRLFGDRPVPVLGHSMGGNLALVLAGLRPAQVSKVVSLDALGPPPARASQTPVSELVLHLDLAERRGFRPERRYGSVTQMAERLCAAHPRLSMARALWLARHSHRAEADGSLTWLHDINIPRSLSFLTAERDWIDIFRRIRCPALYLASADTTRHLAQDGDAPILRRMAAIADGRWQRIPETSHNLHYEEPVLIAALLEEFWRE

SEQ ID NO: 50 - protein, 299 aa, Cupriavidus taiwanensis
MTIKETSRSEFITVRGLRYHVRHWGTPGARKLFMLHGWMDVAASFQFLVDHLRGDWHVIVPDWRGFGETDWPTRYPGTQSYWFADYIADLEALLDHYQPDGQVDLVGHSMGANVICLYAGIRPQRVRRVVDLEGFGMTATRPEHAPRRYARWLDEVRAGAELKTYDSLDGVAARLQKTNPRLPDDRAAFLAAHWSRRNAEGRWEILGDPAHKLVNPMLYRLDEVMAVWQQVTAPVLHVEARDSETLRHIAHKQSIDEFKQRFQAFRDFREAVVEEAGHMLHHDQPAAVAELVESFCAGT

SEQ ID NO: 51 - protein, 295 aa, Dechloromonas aromatica
MLPSRSEYLDLPDIRLHIRRWGNPKAPTLFLLHGWMDVSASFQFVVDELQKDWNIIAPDWRGFGSSEWLNRPYFFAEHLGDLEAILDRYAPEGKVKLVGHSMGGILACLYAGIRPERVESVISLEGFGIAPTTPDMATERYQKWLGVLKSPPRMHLYSDRAGFARRLMHTDRFLTQERANFLSRHLARIGDGETRSGERRHGIIWNGDPWHKAPAPYLFRLEESMAIWRQITCPVLWVAGRQSWVIREFDTRPGDWAARQACFADVREAWVDNADHMLHHDQPEEVARIVETFIA

SEQ ID NO: 52 - protein, 286 aa, Pseudomonas aeruginosa
MSLQVEEVRISLPHIELAAHLFGPPDGRPVIALHGWLDNAMSFSRLAPKLAGLRIVALDFAGHGHSAHRAEGASYLLWDYALDVLMVAEQLGWERFSLLGHSMGAIVSVLLAGALPERVERLALIDGLIPYTGEADKAPQKLGEALKAQLALRHKRKPVYAELEKAVEARMRGVGEISREAAELLAQRGLEPVPGGYTWRTDARLTLPSPLRLTQAHALNFVRSVECPVSLVLAEQGMLAVEPRMRALLETLPFERHHLPGGHHLHLDDEAGAQAVAEVFAKFFAR

SEQ ID NO: 53 - protein, 287 aa, Pseudomonas mendocina
MSKGFEEVRLSLPHIELAAHLYGPEDGQPLLALHGWLDNAASFARLAPKLEGVRIVALDFAGHGHSEHRPAGAGYALWDYAYDVLQVAEQFGWSRFSILGHSMGAITAVLLAGAMPERVARLALIDGLVPFTGEAEQAPEKLGEALRAKLALDHKRKPVYAEMARAVQARMKGVGAVSQEAAELLAQRGLMPVPGGYTWRTDSRLTLPSPLRLSWAHAQAFVRALQCPVSLVLAEQGMMGAQPAVQALLAELPFQVHRLPGGHHLHLDDEAGAQRVADCFNPFLRLP

SEQ ID NO: 54 - protein, 289 aa, Oxalobacter formigenes
MKVSRTEFVDAHDMRLCVRHWGDRDAPKLFMVHGWMDISASFQFVVDAFEKEWHVIAPDMRGFGHSDWAQGGYWFPDYLADLEALLDHYSPDEPVRLLGHSLGGNITSVYAGIRPSRVAHLISLEGYGIVENRPEMAPERLERWLDSRKEPERLRAYPDKEAVIARLRKNNPRLTYERAFFLADYWTEVNDRGERIVMADPKHKSLPVLSRLDEILACWSRIEARVLFVEGQHSLLGIRMKDQARAQEEIRRRASYIRDVRIALVEGAGHMLQHDQPESVARLIEDFLV

SEQ ID NO: 55 - protein, 286 aa, Pseudomonas aeruginosa
MSLQVEEVRISLPHIELAAHLFGPPDGKPVIALHGWLDNAMSFSRLAPKLAGLRIVALDFAGHGHSAHRAEGASYLLWDYALDVLMVAEQLGWERFSLLGHSMGAIVSVLLAGALPERIERLALIDGLIPYTGEADKAPQKLGEALKAQLALRHKRKPVYAELEKAVEARMRGVGEISREAAELLAQRGLEPVPGGYTWRTDARLTLPSPLRLTQAHALNFVRSVECPVSLVLAEQGMLAVEPRMRALLETLPFERHHLPGGHHLHLDDEAGAQAVARVFAAFFAR

SEQ ID NO: 56 - protein, 294 aa, Chromobacterium violaceum
MPGMTPSSSQYLTLNRRRHHLRRWGPEHAPLLILLHGWMDSSATFQFMVDALSSEWQVVAPDWRGFGDSQWNDGSYYFPDYLADLDDLLRQLSPGRPVNLLGHSMGAMIAGIYAGVCPQRIEKLVLAEGFGLNPTRPSEAPGRYGRWLRETSQSIGFEPMASLEQAANKLVARNPMLTPERARWLAAELTRPVDGGFVYRADPRHKMVNPVLYRLEEAMACWRRITAPVLWLLGEHPFDHPIVNDVLATLDQRRACFSRLSEATVAGAGHMLQWEQPESMAAMLESFLLDDETP

SEQ ID NO: 57 - protein, 287 aa, Artificial Sequence
  Description of Artificial Sequence: Synthetic polypeptide
MSLQVEEVRISLPHIELAAHLFGPPDGKPVIALHGWLDNAMSFSRLAPKLAGLRIVALDFAGHGHSAHRAEGASYLLWDYALDVLMVAEQLGWERFSLLGHSMGAIVSVLLAGALPERIERLALIDGLIPYTGEADKAPQKLGEALKAQLALRHKRKPVYAELEKAMEARMRGVGEISREAAELLAQRGLEPVPGGYTWRTDARLTLPSPLRLTQAHALNFVRSVECPVSLVLAEQGMLAVEPRMRALLETLPFERHHLPGGHHPHLDDEAGAQAVARVFAAFFARG

SEQ ID NO: 58 - protein, 302 aa, Ralstonia eutropha
METMTIKETSRSEFITLRGLRYHVRHWGQPGARKLFMLHGWMDVSASFQFLVDHLRGDWHVIAPDWRGFGESDWPTRYPGTQSYWFADYIADLEALLDHYEPDGQVDLVGHSMGANVICLYAGIRPQRVRRVVDLEGFGMTATRPLHAPKRYARWLDELRTGSALKTYDSVDGVAARLQKTNPRLPDDRAAFLAAHWSRCNAEGRWEILGDPAHKLVNPMLYRLDEVMAIWEQVSAPVLHVEARDSETLRNIAHKQAIDEFKERFRAFRDFREAVVDDAGHMLHHDQPAAVAELVESFCSAV

SEQ ID NO: 59 - protein, 288 aa, Shewanella baltica
MWQSLAPQNQIEFVLPHIKVAGRLWGAKDKPLLLALHGWLDNANSFEPLAAHLLDYQVLAIDWPGHGFSAHRPGHYPLHWIDYLYDLDALLTALPQKPVAMVGHSLGGIIASAYTATFPEKVNKLVLIEALSPLSESPTQAKARLRKSFYQHEKYLTQKHGQAKIYDSIETAVRARAHLTGLAEPWCRLLLERNMQPEGEGIGWRSDPRLRLDSPQRLTFAQVDALMQDINIETLLVCGKQGFSQLQTAIPKARTWFKHLSEHIIEGDHHVHMDNAEGVARLIREFVK

SEQ ID NO: 60 - protein, 286 aa, Pseudomonas aeruginosa
MSLQVEEVRISLPHIELAAHLFGPPDGKPVIALHGWLDNAMSFSRLAPKLAGLRIVALDFAGHGHSAHRAEGASYLLWDYALDVLMVAEQLGWERFSLLGHSMGAIVSVLLAGALPERIERLALIDGLIPYTGEADKAPQKLGEALKAQLALRHKRKPVYAELEKAVEARMRGGGEISREAAELLAQRGLEPVPGGYTWRTDARLTLPSPLRLTQAHALNFVRSVECPVSLVLAEQGMLAVEPRMRALLETLPFERHHLPGGHHLHLDDEAGAQAVARVFAAFFAR

SEQ ID NO: 61 - protein, 295 aa, Alcanivorax borkumensis
MDAIERKFSVYGQTISALQWPGEVDRNDAEPILALHGWLDNAASFAPLSRFIQRPLLAMDFSGHGHSDHRPCGVVTHLVDHVRDVLAVVDQLGWKRFTLMGHSMGAGIACLFAAACPERVSRVVLIEGLGPPSTDGKDVASNLRKALDDSASLAGKRKPIYAHVEDAIDARTKGFGGLNHKASALLSDRGLMPVEGGWTWRADSRLRLTSFLRLTEEQVEGFVRAIKAPVCLIIGEQGMGGNGMFDHRLGWLSGATIVRLPGRHHLHMEEPQSVAASINTFLGETDDLLSRAGDD

SEQ ID NO: 62 - protein, 300 aa, Azotobacter vinelandii
MLRLLHPGRRGSSMSLHCEEVRLNLPHIELAAHLYGPEDGPPVLALHGWLDNAMSFSRLAPRLAGLRIVALDFAGHGHSAHRPAGLGYSHWEHAFDVLQVAEQLGWQRFSLLGHSMGAIVAVLLAGALPERVERLALIDGGMPITREAAEAPQQLGDALRGHLALAGKRKPVYENVERAVLARMHGMAALSREAAERLAERGLMPVPGGYTWRADSRLRLPYALRLDPAQAEAFLRAVRCPVSLVLAREGLLAGRPSVAALLERLSFEVHELPGGHHLHLDDEAGAQAVADCFKALFPAS

SEQ ID NO: 63 - protein, 304 aa, Xenopus laevis
MSALLKELRFSVPWGQLAAKAWGPSEGRPVLCLHGWLDNANTFDRLIPLLPNDHHFVALDFSGHGLSSHLPEGVRYQHIDYVTDIHRVVTQLGWRQFSIMGHSMGGVVGGLFASVFPELVKKLILLDSYGFFPVNADMIQTHLKKTINYYSRLEGVSAGKLYSPEGALQRLLEANASLTLESGKLLLQRGTKPVEGGVVFSRDIRVTVNNSLPLSTEQCLLMLSKTQAEVNIIMANEGLTADMMRGVYTDVGQALLKGFKESLKERCQVTVVDGNHFVHLNEPEKVANIIFDFLHARSYLQCNL

SEQ ID NO: 64 - protein, 340 aa, Rhodopseudomonas palustris
MNPCIAMLQQIVSPPRLRRWAPPVGRRPPSRALKRALARAIAAVETLEKTTMQQPQSRFFQSHGLRLHYWDWGNAAAPPLLLIHGGKDHGRSWDVFARALQPHFHVIAPDLRGHGDSDWARGGSYALPEYVYDLTRLPTLADAQPATVIGHSMGGMIAMLYAGTFPEKVKQLVVLDGVTVRPDAKMAPVHERMIKWLGQLDRLEGREPRHYPTIADAAAQMRAHNKRLTPDLALHLATHGARRNDDGSYSWKFDPYQRVTAPHRLAPQEYAELWGRITCPTLLLFAGESFIDPAQAAETSRYFKNVRAEIIADAGHWLQHDRPDEVLRLIAEFVELSPAS

SEQ ID NO: 65 - protein, 288 aa, Shewanella sp.
MWQSFAPKNQVEFVLPHIKLSGRLWGAKDKPLLLALHGWLDNANSFEPLAEYLPHYQILAIDWPGHGFSAHRPGHYPLHWIDYLYDLDALLAMLPQKPLAIIGHSLGGIIASAYTATFPEKVNKLILIEALSPLFESATQAKTRLRKSFYQHEKFLAQKHKQLKVYDNMDTAVKARVHLTGLAEPWCRLLLERNMQPTTDGVAWRSDPRLRLDSPMRLTFEQVDALMQHISVSTLLICGKQGFSQLQAALPKARKWFTHLSEHMLEGDHHVHMDNAKGVAHLIQQFVE

SEQ ID NO: 66 - protein, 297 aa, Ralstonia eutropha
MTIKETSRSEFITLRGLRYHVRQWGTPGAPKLFMLHGWMDVAASFQFLVDCLERDWHVIAPDWRGFGETDWPTRYPGTESYWFADYIADLEALLDHYQPNGQVDLVGHSMGANVACLYAGIRPERVHRVVDLEGFGLTQTRAEQAPKRYARWLDELRQRPELRTYDDVSGVAARLQKTNPRLPDDRAAFLAEHWSRRNEAGQWEILGDPAHKLVNPVLYRVDEVMAIWAEVSAPVLHVEARDSATLRHIAHKQTLEEFRERFRAFRDFREVVIDDAGHMLHHDQPAAVAALIESFIA

SEQ ID NO: 67 - protein, 298 aa, Cellvibrio japonicus
MSDNAQPHQGRLYANGLSFAIQEWGQVGQLPVLALHGWLDNSASFARIAALLPDIHLVAVDMAGHGLSDHRPGVGLYNFWDDIQDILALADVLEWQEFVILGHSRGAIIGALAAVAFPERIKALALIEGLMPEPVKAENAPEQLASALKNLKELAQKQHTVYPDLETAIKARERGLFPLSYHASSLLTRRGVVPVEGGLSWTSDSRLLAPSAIRLTKEHVDAFLKKLTMPLCLVLATRGLPQLYPNYLELLGHYSHIKYHLLEGGHHLHLEEQYAQVAGHVSGFLRDMMNNTHPYRQE

SEQ ID NO: 68 - protein, 288 aa, Shewanella sp.
MWQSSAPENQIEFVLPHIKLAGRLWGAKDRPLLLALHGWLDNANSFEPLAAYLMDYQVLAIDWPGHGFSAHRPGHYPLHWIDYLYDLDALLGVLPVQPVAIIGHSLGGIIASAYTAVFPEKVNKLILIEALSPLFEPVTQAKSRLRKSFYQHEKYLAQKQRQLKVYDTIDTAVRARSHLTGLAEPWCRLLLERNMRTEGGGIGWRSDPRLRLDSPQRLTFAQVDALMQDISVSTLLICGRQGFHQLQSALPKARMWFKHLSEQTIDGDHHVHMGNALGVAELIKSFIE

SEQ ID NO: 69 - protein, 289 aa, Rhodopseudomonas palustris
MQQPQSCFFQSHGLRLHYWDWGNAAARPLLLIHGGKDHGRSWDHLARALQPHFHVIAPDLRGHGDSDWARGGSYALPEYVYDLTRLPPLADAPPATVIGHSMGGMIAMLYAGTFPERVERLVVLDGVTVRPDAKMAPAHERMTKWLGQLDRLEDREPRRYPTIDDAAAQMRAHNKRLTSELSLHLATHGVRRNDDGSYSWKFDPYQRVTAPHRLAQSEYAELWARIACPTLLLFAGESFLQPAEAAAASRHFKDVRSETVSDAGHWLQHDRPDEVLRLIAEFVELPSGS

SEQ ID NO: 70 - protein, 288 aa, Shewanella baltica
MWQSLAPQNQIEFVLPHIKVAGRLWGAKDKPLLLALHGWLDNANSFEPLAAHLLDYQVLAIDWPGHGFSAHRPGHYPLHWIDYLYDLDALLTALPQMPVAMVGHSLGGIIASAYTATFPEKVNKLVLIEALSPLSESPTQAKARLRKSFYQHEKYLTQKHGQAKIYDSIETAVRARAHLTGLAEPWCRLLLERNMQPEGEGIGWRSDPRLRLDSPQRLTFAQVDALMQDINIETLLVCGKQGFSQLQTAIPKARTWFKHLSEHIIEGDHHVHMDNAEGVARLIREFVK

SEQ ID NO: 71 - protein, 288 aa, Shewanella putrefaciens
MWQSSAPENQIEFVLPHIKLAGRLWGAKDRPLLLALHGWLDNANSFEPLAAYLMDYQVLAIDWPGHGFSAHRPGHYPLHWIDYLYDLDALLGVLPVQPVAIIGHSLGGIIASAYTAVFPEKVNKLILIEALSPLFEPVTQAKSRLRKSFYQHEKYLAQKQRQLKVYDTIDTAVRARSHLTGLAEPWCRLLLERNMRTEGGGIGWRSDPRLRLDSPQRLTFAQVDALMQDISVTTLLICGRQGFHQLQSALPKARMWFKHLSEQTIDGDHHVHMGNALGVAELIKSFIE

SEQ ID NO: 72 - protein, 288 aa, Shewanella sp.
MWQSFAPKNQVEFVLPHIKLSGRLWGAKDKPLLLALHGWLDNANSFEPLAEYLPHYQILAIDWPGHGFSAHRPGHYPLHWIDYLYDLDALLAMLPQKPLAIIGHSLGGIIASAYTATFPEKVNKLILIEALSPLFESPTQAKTRLRKSFYQHEKFLAQKHKQLKVYDNMDTAVKARVHLTGLAEPWCRLLLERNMQPTTDGVAWRSDPRLRLDSPMRLTFEQVDALMQHISVSTLLICGKQGFSQLQSALPKARKWFTHLSEHMLEGDHHVHMDNAKGVAHLIQQFVE

SEQ ID NO: 73 - protein, 299 aa, Unknown
  Description of Unknown: Gamma proteobacterium NOR51-B hydrolase polypeptide
MTKGADQNDSARERSFEVDGLIYAGLEWGKPEAPLALALHGWLDNALSFSILGPLLNRCRILALDLSGHGLSSHRSADASYQIWDDVPQLASIIEQLGEDSVTLIGHSRGAAISTLLASVLGDQCHRLVLIDGMLPPEEANSDAAAQLRRFVRERTKYRQRPQRIFDSIEDFIERRARYGFAAENGEFIAPRALRQVNGGWCLRSDPRLYGASAHKLTAADRRHIYQQINAPVLGLFGDKGLYERRDASRVDEPQSIQRLQGELSDCLPDYRSTILSGSHHLHMESCAHEVARHIDDFI

SEQ ID NO: 74 - protein, 288 aa, Shewanella oneidensis
MWQSFAPQNQVQFVLPHIKLSGRLWGTKDKPLILALHGWLDNANSFEPLADYLSDYQILAIDWPGHGFSAHRPGHYPLHWIDYLYDLDALLAVLPQKPQAIMGHSLGGIVASAYTAAFPEKVNKLILIEALSPLFESASQAKSRLRKSFYQHEKFLAQKHKQIRGYDSINTAVKARVHLTGLAEPWCRLLLERNMQATSDGVVWRSDPRLRLDSPMRLTFEQVDALMQNIPVSTLLICGKQGFSQLHAALPKARKWFSNLSEHMLEGDHHVHMDNAQAVGQLIQRFVD

SEQ ID NO: 75 - protein, 288 aa, Kangiella koreensis
MHVKFDQEYHFQIHHNKVSVLEWGDPKAEPILCLHGWLDNAATFHYLAPYLADKYRLIAIEFPGHGQSEHLSEDADYQFVSGISIIDGALDVLHIDKCHILGHSMGAALAMIYAGAVPNRVKSLVSIDALGPFISTPHQTIEQLAQAIDQRKAKRSQKRYFNSIEEAANARAQVSELSAETLLPLIERGVTLCDRGYQWSSDARLKNASWIRMTEPQLEALMNNVAAEVLFIRGKQGMLQEKPAIERRLSYLQQSEWIDLEGGHHLHMQYPESVAESVLKFWAKFNQG

SEQ ID NO: 76 - protein, 300 aa, Rhodopseudomonas palustris
MFFGIDRSAPHARAYMQNPESRFYRSHGLRLHYADWGNDTAPPLLLIHGGADHGRSWDHLARSLRPDFHVVAPDLRGHGDSDWTLGGSYSLPEYIYDLTRLPAFEGRGPITVIGHSMGGMVGLIYAGTFPEKVARLVVLDGVTVLPNAPKPPAHERTRKWIGQLDALEQREPRRYRDIEEAAAQMQAHNKRLTPELALHLATHGVKQNDDGSYSWKFDPYQRVMAPHRLWPDDHVALWARIACPTLLLFAGESFLGDAASAGIADHFQQARVETVADAGHWLQHDRPDEVLRLIREFLLG

SEQ ID NO: 77 - protein, 288 aa, Shewanella putrefaciens
MWQSSAPENQIEFVLPHIKLAGRLWGAKDRPLLLALHGWLDNANSFEPLAAYLMDYQVLAIDWPGHGFSAHRPGHYPLHWIDYLYDLDALLGVLPVQPVAIIGHSLGGIIASAYTAVFPEKINKLILIEALSPLFEPVTQAKSRLRKSFYQHEKYLAQKQRQLKVYDTIDTAVRARAHLTGLAEPWCRLLLERNMRTEGGGIGWRSDPRLRLDSPQRLTFAQVDALMQDISVSTLLICGRQGFHQLQSALPKARMWFKHLSEQTIDGDHHVHMGNALGVAELIKSFIE

SEQ ID NO: 78 - protein, 284 aa, Stenotrophomonas sp.
MSLHPFELEVGGARVAGLRNHGEGPRVLALHGWLDNAASFVPLAPHLSSLQLVAIDLPGHGHSAHLPAGASYTTPAAICHVLDVADALGWDRFSLLGHSMGAGIASLTASVSDRIERLVAIEALGGLRGPEEETAHRLREHVNATRALARKQLRVFPDLAAPIRARMMTNQLSEGCARLLVERGVEPVEGGYRWCSDPRLMLPTAIRLSEGQIDNLLQAIACPTQVIYATPAQSYYPEPMRSDRLRHLRDGRLAVFPGNHHLHMEDPAQVADVILHFFSNDDAG

SEQ ID NO: 79 - protein, 290 aa, Sphingobium japonicum
MNTQAAPTSHFYTSLRMRLHYLDWGNSAAPTLILVHGGFDHARSWDWTARALAKDYHVVAPDLRGHGDSAWSAEGSYMMANYVYDLAQLIEQLGREPVILVGHSLGGSVALRYAGLFPDRVARIVAIEGLGLSPGRIEEQAQKAGPDQWLQWIDKRRTRARQTRRHYPTIEAAVARMRERNDHLSVEQAMHLTIHGVNRNEDGSYRWKFDPYLHDPAPQAWSDVDLPQFWKRITCPTLLCLGLDSWASNPVKDGRAAHFQDARLVEFANAGHWLHHDQFDRFMAELRGFL

SEQ ID NO: 80 - protein, 288 aa, Shewanella baltica
MWQSLAPQNQIEFVLPHIKVAGRLWGAKDKPLLLALHGWLDNANSFEPLAAHLLDYQVLAIDWPGHGFSAHRPGHYPLHWIDYLYDLDALLTALPQKPVAMVGHSLGGIIASAYTATFPEKVNKLVLIEALSPLSESPTQAKARLRKSFYQHEKYLTQKHGQAKIYDGIDTAVRARAHLTGLAEPWCRLLLERNMQPEGEGIGWRSDPRLRLDSPQRLTFAQVDALMQDINIETLLVCGKQGFSQLQTAIPKARTWFKHLSEHIIEGDHHVHMDNAESVARLIREFVK

SEQ ID NO: 81 - protein, 285 aa, Aeromonas hydrophila
MLQERFLTLADGRRVALLESQPAPAEQMSKPLLVALHGWLDNSASFLPLAPYLTHFQLVCIDLPGHGHSDHKSTPYVFVDWLDDLYQIAQAAGWTAFTLLGHSLGALIASAYAGVFPEQVERLILLEGLGPLSQPDEAVPEQLRRAILNRSRTRERASQGFASIDEAVAARCKVADIDPGSARLICERQLEARAGRWHWRSDPRLRDLSPMRMSEGQAQALIRAITCPVLFIAGAEGFASLQAQWQQRHAAFTQIERVVLAGNHHFHMENSAETAVCIEKFCQIR

SEQ ID NO: 82 - protein, 507 aa, Micromonas pusilla
MVKETIQREWLSGVLDGVVDVKSGRGNDGISDSGAPYCEKVTNLESRTIKEMTMSSIKSAMWTEAERLWALGNANVIDFLRSVSRERYLRFSYEDLVTRPRAVSENLCTLIGIPHELIMTTPYTATNVATFAPVTEGGLGAGDPHMLKRCSIDPKLADAWRDAESPMTLAQFTSHVAKRLGYRLPGWKEPTLQVGTAPEIVRLNDKTTCPVILFAHDLSGEVTKAAPLAKKLSCAAFGFRVAPFREKGSGDHSGVPSCTLLQVPDLPSLAAYYRHLAAVSLGLESGDDVVYAGVGQFGRSLATQMAAQQQRANTIHIEDRKYLLRNQNSRSWDATKERGCDSCAAGLLLLPEDDYNISRVPADIRALYDVVQNEINMHDISDNSYASRISTLTLTKFENGLVAAGGRGSPEATLAYAESFRYADKNLESCKKSGHANTACATWDDRVHRALCVARRGAALLATDDRLSDFDGETIDMTGERRLTNMRSAELAEAVSARLFTRQVKKK

SEQ ID NO: 83 - protein, 308 aa, Unknown
  Description of Unknown: Marine gamma proteobacterium HTCC2143 putative hydrolase polypeptide
MRETFLNITANDFERFYFTHSNCQLSFVDFGSPDKPALILLHGMRDHALSLLNVAQALKNDFHVVALDMRGHGRSDNPGIYTMIHYVADVRALVQYCGLDKPVIVAHSMGGHIASRYSAAFPDEVDRLILLDGMGPPDWTDKPDINHLKVGLRHGVDAVSSLYIEGRQMPDRNEAIRRLRDNNPLLSADLAEIIVEHGVDTHSQGGIRWSFDPSVQMIWHTFPHHESEDVWRGIDCPVLIVTGSDALNYWVANQPTLKDQGVFYTASLQRKQQLFTDARHCVVDGAGHMLHYDQPEQLNGVLRDFLVG

SEQ ID NO: 84 - protein, 327 aa, Parvibaculum lavamentivorans
MFFGFWQRTLRFCHSELGGIFFGTSPKRMDFMTDQNAQLIGPASRVYFSQRLRLHYVDWGNEGAPPLLMVHGGRDHCRNWDWTAQAMRDRYHIIAPDLRGHGDSQWMVGSGYELNDYVYDIAQLIHQKGLAPLTIIAHSMGGAVALRYAGLYPETVKKLIVIEGLGPSPKMLSERKEISADQRIRNWIDEVRKLSSRQPRRYDSIEDAYKRMQEENPHLSPERARHLTVHGVNQNEDGTYSWKFDNYVRAFSPMGFDEETSTKLWGRITCPTLLIRGTESWASDPVADGRAKHFQNAKVVAVEGAGHWVQHDKLDEFLRLTDEFLAE

SEQ ID NO: 85 - protein, 288 aa, Shewanella baltica
MWQSLAPQNQIEFVLPHIKVAGRLWGAKDKPLLLALHGWLDNANSFEPLAAHLLDYQVLAIDWPGHGFSAHRPGHYPLHWIDYLYDLDALLTALPQKPVAMVGHSLGGIIASAYTATFPEKVNKLVLIEALSPLSESPTQAKARLRKSFYQHEKYLTQKHGQAKIYDGIDTAVRARAHLTGLAEPWCRLLLDRNMQPEGEGIGWRSDPRLRLDSPQRLTFAQVDALMQDINIETLLVCGKQGFSQLQTAIPKARTWFKHLSEHIIEGDHHVHMDNAEGVARLIREFVK

SEQ ID NO: 86 - protein, 288 aa, Shewanella baltica
MWQSLAPQNQIEFVLPHIKVAGRLWGAKDKPLLLALHGWLDNANSFEPLAAHLLDYQVLAIDWPGHGFSAHRPGHYPLHWIDYLYDLDALLTALPQNPVAMVGHSLGGIIASAYTATFPEKVNKLVLIEALSPLSESPTQAKARLRKSFYQHEKYLTQKHGQAKIYDGIDTAVRARAHLTGLAEPWCRLLLERNMQPEGEGIGWRSDPRLRLDSPQRLTFAQVDALMQDINIETLLVCGKQGFSQLQTAIPKARTWFKHLSEHIIEGDHHVHMDNAEGVARLIREFVK

SEQ ID NO: 87 - protein, 311 aa, Acidovorax ebreus
MYQAQRPCRTETVPVRTLHYHVRVWGERPADAPPLVLLHGWMDVGASYQFVVDAFSAAFAAGRQIIAPDWRGFGHTRTPAPSDSYHFVDYLADLDQLLDHYAGEQPVDLVGHSMGGNVAMLYAGARPSRIRRLVNLEGFGLPATQPAQAPQRLAQWMDEIRQFERGDLALKHYDSADGVALRLMKTNPRLPSDKAAWLARHWAAQDAQGRWHIQGDAAHKIVNPQLYRVDEVLALYQAITAPVLSVHASDDSLGQWWKGRYTLQEYHQRLTQVRDVRHAVVEDAGHMLHHDQPQAVAALIEAFVAGPAPAA

SEQ ID NO: 88 - protein, 296 aa, Candidatus Accumulibacter phosphatis
MQTLLTPSHCEQVPINGLVYNVRHWGPADAPRLLMLHGWMDSSASFQFTVDALRHTWHVLAPDWRGYGRSQWLNRRYWFADYYADLDALLDRYSAGVPARIVGHSMGGAVASIYGGARPERIAGLLMVDFLGLLPNEAHEAPARIRDWLDHTRATPQLRAYASREQLAARLRQFNARLLPERATFLATHCASQLPDGRFAVACDPWHKVPSPHLYRIEEVMACWRALTAPVLLVTADEGYVMQRFAKDPGELQRRMDCFANASIAHISDCGHNVQHDRPEKLAELIESFFSYPDPP

SEQ ID NO: 89 - protein, 288 aa, Aeromonas salmonicida
MTVTMQENMVTLADGRRVALLENEQPAPGQQGKPLLIALHGWLDNGASFLPLASYLADFHLICVDLPGHGHSDHKTTPYVFVDWLDDLYQITQATGWSRFILLGHSLGALIASAYAGVFPEQVERLIMLEGLGPLTQPDDTVPEQLRKAILNRSRTRERAPNGFASIDEAVMARCKVADIAPSAARLICERQLVERAGRWYWRSDPRLRDLSPMRMSEGQAQALIRAIRCPVLFIRGEQGFASLLAQWQLRHGAFERIERVVLAGNHHFHMENSADTAVCIEKFCQIR

SEQ ID NO: 90 - protein, 289 aa, Oxalobacter formigenes
MKASRTEFVNLNNMRLCMRHWGDEDAPKLFMVHGWMDISASFQFIVDAMKRDWHVIAPDLRGFGQSEWAVGGYWFPDYLADLEAMLNHYSPDEPVRLLGHSLGGNITSVYSGVRPSRVAQLISLEGYGIVENRPEMAPERLERWLDARKYPERLRSYRDREAVADRLQQNNSRLTRERARFLADYWSEENDKGERVIMADPKHKSLPVLSRLDEILACWSRIEARVLFVEGKHSLLGIRMKDQEKAQEEIRRRAAYIKDVRIALVDDAGHMLQHDQPEVVAGLIDGFLV

SEQ ID NO: 91 - protein, 291 aa, Shewanella pealeana
MSLVREFGDEVSIQLPHIKLAGRLWGSADKPLILALHGWLDNANSFQPLSEHLTDYQILAIDWPGHGGSEHRPGAYPLHWIDYLYDLDALLQKLPNIQAPVAILGHSLGGIIASAYAAAFPDRVENLILIEALSPLYEDESKSKNRLDKSFSAHRRFLASIDKPANVYRDMAVAVLARHKLTALELQWCELLTQRNMQIFDSGVCWRSDPRLKLDSPLRLTFSQVDALMQAHKVNTLLISGNRGFSQLREAIPMANRWFKRLQSVEIEGDHHLHMGSAEKVSKVISVFLKG

SEQ ID NO: 92 - protein, 285 aa, Rhodopseudomonas palustris
MQNPESRFYRSHGLRLHYADWGNDTAPPLLLIHGGADHARSWDHLARSLRADFHVVAPDLRGHGDSDWTLGGSYSLPEYVYDLTRLPAFEGRGPITIVGHSMGGMVSLIYAGTFPEQVARLVVLDGVTVRPDAAKPPVHERTRKWIGQLEALENREPRRYRDIAEAAAQMQAHNKRLAPELALHLATYGVKQNDDGSYSWKFDPHQRVMAPHRLWPDDHVALWGRITCPTLLLFAGESFLSDAAEAGIADHFPQARAETVAGAGHWLQHDRPDEVLRLIRDFLLV

SEQ ID NO: 93 - protein, 322 aa, Sorangium cellulosum
MRRSSEFLNTNGLDLCVHRFRDDHARPTGLTLLLLHGFLDAGSTWDLVAEPLARAGHDVVAPDLRGFGRSARVGAGSYYYFPDYIADVAALVDALAPARLGVVGHSMGGAVAVYYAGACPGRVERLALLEGMGPPASGPEVAVARVEAWLRQMAGLDRAPRRLSSMQDAIARLEANHPRVPRDVLATRAPLLTREAPDGGLAWAYDPMHRTTSPLLFQVEAFMTFLERIACPTLLVSGGPTGWHPEDEAERVARLKRAEHVELPEAGHMMHWSAAAELAERLGEFFAAGGDAGDAAGAAGKGIAEAAEAAEAAAAASETGSL

SEQ ID NO: 94 - protein, 305 aa, Ralstonia solanacearum
MDSTTLPAARLASRSTYLPVRGLRYHIREWGEPGAPILFLFHGWMDVSASFQFLVEALRERWHIVAPDWRGYGQTAWPTDAPGVDAYWFADYLADLEAIVDHYQPDGQVTLVGHSLGANVVCLYAGVRPERVRRVVDLEGFGMPASKPSHAARRYARWLDELKDKPRLNTYATLDDVAARLQKTNPRLPADKAAFLARHWSRQNADGRWEILGDPAHKIVNPQLYRLDEVMEIWRRVTAPVLHVEAVDSPTLIALAGDVPLPEFKARFAAFPDFREVMIADAGHMLHHDQPEQVAALVEAFCTAA

SEQ ID NO: 95 - protein, 303 aa, Taeniopygia guttata
MFSELKFPVPWGHVAAKAWGPSEGHPVLCLHGWLDNANTFDKLIPLLPRGCYYVAMDFSGHGLSSHRPAGCPYHFLDYVTDVRRVAAALQWRRFTLMGHSMGGAVAGMFCFLYPEMVDKLILLESLGFLLAPEDTEAWLKSKRRVIDRLLSLEAKQQTPKARSPEAALQRLLEANSHLTAEGGAILLQRGATETPAGLVYNRDMRARTQSREFFTVEQCVKLLQQIQDRVLIIVSQDGLLVPHNLPSRNHFVKALQEAFESTLKEHIQLAEVPGSHFVHLNEPEVVSGIISNFLTAQNTRARL

SEQ ID NO: 96 - protein, 284 aa, Pseudomonas syringae
MTFSVEEVRFNLGHIELAAHLYGPEDGRPVIAVHGWLDNANSFARLAPQLDGLRIVALDLAGHGHSAHRPAGASYALADYVFDVLQVAEQLGWQRFALMGHSLGAIISVLLAGSLPERVTRLALIDGLIPLTGDPESAAERMGSALQAQLRLSGKKKPVYEDQQRAVQARMKGVVPVSREAAELLAQRGLMPVPGGYTWRSDSRLTLPSAIRLTHQQAMSFVNAIRCPTQLLVATGGMLTKNQLMLSGLPFDVVQLEGGHHLHLDDEQGASAVAHCINRFFAAS

SEQ ID NO: 97 - protein, 305 aa, Laribacter hongkongensis
MENSRFNHHLRMTPCLLSRSLHLQLNHHRHHVRIWGDDDWPRLFMLHGWMDHSATFQFLAEAFIRSYQIIAPDWRGFGGSDWNSGSYYSPDYLADLDALLAHFSPRQPVHLIGHSMGGMIASLYAGIRPERVASLVSIEGFGMPDSQPANAPERYARWLEQKRSGMSFGPLTSLDMLAARMQWRQPHLTPERALWLAGQWTTTDPHGGLQYRADPRHKMVNPVLYRLEEAKACWRRITCPVLWVIGGAPEHSVSAQAVFNTLDERRSCFAKLSEVTIANAGHMVQQEQPEALAKAIEDFLSGIIA

SEQ ID NO: 98 - protein, 330 aa, Monosiga brevicollis
MASAAPKTHPLSAERPPLPFEVVERRFPTPGGHVGGWSHGPPSRDVVVAIHGWLEHADCWLPLLAHLPKDRQYVAIDLPGHGYSTHRGNGMGYAVSDYVRDIAMVMQQLRDQAAPETRFHLLGHSMGAMISFLYAGAFPEQITSLVLVDGVVPITADDAAAASRLASSIENWLVLHTKAAAQTPMSLEVAFQRLAKGNPDVESHALPYLFPRSVRQVKPGQFVFNRDLLVKQVTPYRFTPKQALSFARRIQCPTLAILANDGLRTAPPDETQRQLAALQEAMPTLRLAYVEGNHHVHMNDASTVAKDIADFWSLPASLPAQEARPIAAKL

SEQ ID NO: 99 - protein, 284 aa, Pseudomonas syringae
MTVAVEEVRLSLGHIELAAHLYGPKDGQPVIALHGWLDNANSFARLAPRLEGLQVVALDLAGHGHSDHRPAGSSYALADYAFDVLQVAEQLGWQRFALLGHSLGAIISVLLASSLPERVTRLALIDGLLPLTGKAESAAERMGAAMQAQLELANKKKPVYQDQDRAIQARMKGVVAVSREAAELLAQRGLMPVPGGYTWRSDSRLTLPSAIRFTDQQAMAFVHGIRCPTQLMVASDGMLAQRQELLSALPFDVERLAGGHHLHLNDEQGARSVAHCINRFFAAS

SEQ ID NO: 100 - protein, 296 aa, Burkholderia thailandensis
MHSTQSVSDFVTVRGVKLHVRRWGRPDAPTLYMLHGWMDVAASFQFVVDALAGDWQVIAPDARGFGLSDWPVAAQGGGHYWFHEYLADLDALIDHYTPDGEVNLVGHSMGANVVCLYAGARPQRVRRVVDLEGFGLAPAHAEQAPRRLAQWLDELRAPPELKRYASLEDVAARLVKTNPRLEPRRAAFLAAHWATRDADGQYRLLADPAHKLRGPLLYRLDEVMAIWSKVRARVLHIEAVDSPTLAFLAGEIPLPEFKARFSAFADWREKLVEDAGHMVHHDQPEQIAALIEAFCA

SEQ ID NO: 101 - protein, 299 aa, Teredinibacter turnerae
MNHFRGEEVVFKLPGITLRGERWGDPDGLPVIALHGWLDNAGSFDFLAPELKSINLVALDLAGHGKSDHRPLVAAYNVWLDVAEVLAVAEQLGWTTFGLLGHSRGAMISTILAGSFPEKVTHLALIEAIVPQPIPPEEAPAQLASSINITRTLARKPLREHPNYESAVVARTHGMTELTLEDARALARRGVVKRGNGYSWANDYKVMAPSEVKFTREQVEAFISCLSLEVLIFAGKQGIINSFHQLDEWLEKYPNLRRIELEGDHHLHMSTNYRAVATYCNTYFKTDPKDLLKQKAGRQ

SEQ ID NO: 102 - protein, 305 aa, Ralstonia solanacearum
MDSTTLPAARLASRSTYLPVRGLRYHIREWGEPGAPILFLFHGWMDVSASFQFLVDALRERWHIVAPDWRGYGQTAWPTGAHGVDSYWFADYLADLEAIVDHYQPEGRVTLVGHSLGANVVCLYAGVRPERVRRVVDLEGFGMPASKPSQAARRYARWLDELKDKPRLNTYATLDDVAARLRKTNPRLPADKAAFLARHWSRQNADGRWEILGDPAHKIVNPQLYRLDEVMEIWHRVTAPVLHVEAVDSPTLVALAGDVPLPEFKSRFAAFPDFREVLIADAGHMLHHDQPAQVAALVEDFCRAG

SEQ ID NO: 103 - protein, 305 aa, Ralstonia solanacearum
MDSTTLPAARLASRSTYLPVRGLRYHIREWGEPGAPILFLFHGWMDVSASFQFLVDALRERWHIVAPDWRGYGQTAWPTGAPGVDSYWFADYLADLEAIVDHYQPEGRVTLVGHSLGANVVCLYAGVRPERVRRVVDLEGFGMPASKPSQAARRYARWLDELKDKPHLNTYATLDDVAARLRKTNPRLPADKAAFLARHWSRQNADGRWEILGDPAHKIVNPQLYRLDEVMEIWHRVTAPVLHVEAVDSPTLVALAGDVPLPEFKSRFAAFPDFREVLIADAGHMLHHDQPAQVAALVEDFCRAG

SEQ ID NO: 104 - protein, 305 aa, Ralstonia solanacearum
MDSTTLPAARRASRSTYLPVRGLRYHIREWGEPGAPILFLFHGWMDVSASFQFLVDALRERWHIVAPDWRGYGQTAWPTGAPGVDSYWFADYLADLETIVDHYQPEGRVTLVGHSLGANVVCLYAGVRPERVRRVVDLEGFGMPASKPSQAARRYARWLDELKDKPRLNTYATLDDVAARLRKTNPRLPADKAAFLARHWSRQNADGRWEILGDPAHKIVNPQLYRLDEVMEIWRQVTAPVLHVEAVDSPTLVALAGDVPLPEFRSRFAAFPDFREVLIADAGHMLHHDQPAQVAALVEDFCRAG
